(19) United States
(12) Patent Application Publication
(10) Pub. No.: US 2023/0416794 A1
(43) Pub. Date: Dec. 28, 2023

(54) Engineered Microorganisms for Producing Substituted Tryptamines

(71) Applicant: ALGAE-C INC., Caledon (CA)

(72) Inventors: Fatima Awwad, Trois-Rivieres (CA); William Mather Almon Carscallen, Halifax (CA); Elisa Ines Fantino, Trois-Rivieres (CA)

(21) Appl. No.: 18/036,768

(22) PCT Filed: Nov. 15, 2021
(86) PCT No.: PCT/CA2021/051617

§ 371 Date: May 12, 2023

Related U.S. Application Data
(60) Provisional application No. 63/114,145, filed on Nov. 16, 2020.

(51) Int. Cl. C12P 17/10; C12N 1/12; C12N 9/02; C12N 9/12; C12N 9/10; C12N 15/79; C12N 15/52

(52) U.S. Cl. CPC C12P 17/10; C12N 1/12; C12N 9/0083; C12N 9/1205; C12N 9/1007; C12N 9/1085; C12N 15/79; C12N 15/52; C12Y 201/01049; C12Y 114/16004; C12Y 205/01034; C12R 2001/89

(57) ABSTRACT

Provided herein are microorganisms for producing substituted tryptamines and cell cultures thereof, the microorganisms comprising at least one exogenous nucleic acid molecule that encodes at least one substituted tryptamine biosynthetic pathway enzyme.

### CROSS-REFERENCE TO RELATED APPLICATION

[0001] This Application claims the benefit of and priority from U.S. Provisional Patent Application No. 63/114,145, filed Nov. 16, 2020.

### FIELD

[0002] The present disclosure relates to microorganisms comprising an overexpressed tryptophan synthase, microorganisms comprising at least one nucleic acid molecule that encodes at least one substituted tryptamine biosynthetic pathway enzyme, and to substituted tryptamine biosynthetic pathway enzymes.

### BACKGROUND

[0003] Heterocyclic compounds have been proven to have important biological activity, especially indole derivatives. Important indole derivatives include substituted tryptamines that comprise a group of psychoactive compounds with properties of hallucinogens, neurotransmitters, and/or neuromodulators. The psychoactive properties of substituted tryptamines make them promising candidates for medicinal use, such as the treatment of depression, anxiety, or mental illness.

[0004] Substituted tryptamines such as psilocybin are produced naturally by fungi including members of the genus Psilocybe (e.g. P. cubensis and P. cyanescens). Culture of these fungi can be difficult and limiting to scaled production of psilocybin.

[0005] The production of psilocybin and other useful substituted tryptamines may be accelerated and rendered more economical by producing them in microorganisms that are easily culturable and that are capable of producing substituted tryptamines at larger scales.

### SUMMARY

[0006] The present disclosure provides a microorganism comprising an overexpressed tryptophan synthase.

[0007] The present disclosure further provides a microorganism comprising at least one nucleic acid molecule that encodes at least one substituted tryptamine biosynthetic pathway enzyme.

[0008] A microorganism comprising at least one exogenous nucleic acid molecule that encodes at least one substituted tryptamine biosynthetic pathway enzyme, wherein the at least one substituted tryptamine biosynthetic pathway enzyme comprises a tryptophan decarboxylase, an indole-ethylamine methyltransferase, a tryptamine 4-monooxygenase, and a 4-hydroxytryptamine kinase.

[0009] A microorganism comprising at least one exogenous nucleic acid molecule that encodes at least one substituted tryptamine biosynthetic pathway enzyme, wherein the at least one substituted tryptamine biosynthetic pathway enzyme comprises an indole-ethylamine methyltransferase, a tryptamine 4-monooxygenase, and a 4-hydroxytryptamine kinase.

[0010] The present disclosure further provides a microorganism comprising at least one exogenous nucleic acid molecule that encodes at least one substituted tryptamine biosynthetic pathway enzyme, wherein the at least one substituted tryptamine biosynthetic pathway enzyme comprises a dimethylallyl tryptamine synthase.

[0011] The present disclosure further provides a microorganism comprising at least one exogenous nucleic acid molecule that encodes at least one substituted tryptamine biosynthetic pathway enzyme, wherein the at least one substituted tryptamine biosynthetic pathway enzyme comprises a tryptophan decarboxylase, a tryptamine 5-hydroxylase, and an indole-ethylamine methyltransferase.

[0012] The present disclosure further provides a microorganism comprising at least one exogenous nucleic acid molecule that encodes at least one substituted tryptamine biosynthetic pathway enzyme, wherein the at least one substituted tryptamine biosynthetic pathway enzyme comprises a tryptamine 5-hydroxylase, and an indole-ethylamine methyltransferase.

[0013] The present disclosure further provides a microorganism comprising at least one exogenous nucleic acid molecule that encodes at least one substituted tryptamine biosynthetic pathway enzyme, wherein the at least one substituted tryptamine biosynthetic pathway enzyme comprises a tryptophan decarboxylase, a tryptamine 4-monooxygenase, a 4-hydroxytryptamine kinase, and either an N-methyltransferase or an indole-ethylamine methyltransferase, wherein the N-methyltransferase or indole-ethylamine methyltransferase is overexpressed and/or present in multiple copies.

[0014] The present disclosure further provides a microorganism comprising at least one exogenous nucleic acid molecule that encodes at least one substituted tryptamine biosynthetic pathway enzyme, wherein the at least one substituted tryptamine biosynthetic pathway enzyme comprises a tryptamine 4-monooxygenase, a 4-hydroxytryptamine kinase, and either an N-methyltransferase or an indole-ethylamine methyltransferase, wherein the N-methyltransferase or indole-ethylamine methyltransferase is overexpressed and/or present in multiple copies.

[0015] The present disclosure further provides a microorganism comprising at least one exogenous nucleic acid molecule that encodes at least one substituted tryptamine biosynthetic pathway enzyme, wherein the at least one substituted tryptamine biosynthetic pathway enzyme comprises a tryptophan halogenase and a tryptophan decarboxylase. The present disclosure further provides a substituted tryptamine biosynthetic pathway enzyme comprising an amino acid sequence with at least 80%, at least 85%, at least 90%, at least 95%, at least 99%, or 100% identity to the sequence as shown in any of SEQ ID NOs: 1-18 and 23-321.

[0016] The present disclosure further provides a tryptophan synthase comprising an amino acid sequence with at least 80%, at least 85%, at least 90%, at least 95%, at least 99%, or 100% identity to the sequence as shown in any of SEQ ID NOs: 19-22.

[0017] The present disclosure further provides a nucleic acid molecule encoding an enzyme as described herein.

[0018] The present disclosure further provides a vector comprising a nucleic acid molecule as described herein.

[0019] The present disclosure further provides a cell comprising a nucleic acid molecule or a vector as described herein.

[0020] The present disclosure further provides a cell culture comprising (i) the microorganism as described herein and (ii) a culture media optionally supplemented with a high concentration of tryptamine.

[0021] The present disclosure further provides a cell culture comprising (i) a microalga or a stramenopile comprising at least one exogenous nucleic acid molecule that encodes at least one substituted tryptamine biosynthetic pathway enzyme and (ii) a culture media supplemented with a high concentration of tryptamine.

[0022] The present disclosure further provides a method for producing at least one substituted tryptamine in a microalga or a stramenopile, comprising culturing the microalga or stramenopile in a culture media supplemented with a high concentration of tryptamine, wherein the microalga or stramenopile comprises at least one exogenous nucleic acid molecule that encodes at least one substituted tryptamine biosynthetic pathway enzyme.

### BRIEF DESCRIPTION OF THE DRAWINGS

[0023] The accompanying figures illustrate embodiments of the invention by way of example.

[0024] FIG. 1. Shows tryptamine (A) denoted with commonly substituted ‘R’ groups (B).

[0025] FIG. 2. Shows an exemplary substituted tryptamine biosynthetic pathway resulting in the production of psilocybin from L-tryptophan.

[0026] FIG. 3. Shows an exemplary substituted tryptamine biosynthetic pathway resulting in the production of serotonin from L-tryptophan (left), the production of psilocybin from L-tryptophan (center), and the production of DMT from L-tryptophan (right).

[0027] FIG. 4. Shows exemplary substituted tryptamine biosynthetic pathways for the production of psilocybin from L-tryptophan.

[0028] FIG. 5. Shows an exemplary substituted tryptamine biosynthetic pathway for the production of aurantioclavine from L-tryptophan.

[0029] FIG. 6. Shows an exemplary substituted tryptamine biosynthetic pathway for the production of bufotenine from L-tryptophan.

[0030] FIG. 7. Shows the survival rates as a percentage of live cells of different microorganism cultures (C. reinhardtii, P. tricomutum, S. limacinum, E. coli, and S. cerevisiae) supplemented with 2 mM of tryptamine for 36 hours after the addition of tryptamine to the culture media.

[0031] FIG. 8. Shows the survival rates as a percentage of live cells of different microorganism cultures (C. reinhardtii, P. tricomutum, S. limacinum, E. coli, and S. cerevisiae) supplemented with 5 mM of tryptamine for 36 hours after the addition of tryptamine to the culture media.

[0032] FIG. 9. Shows the relative growth of different microorganism cultures supplemented with 0.1 mM, 1 mM, or 10 mM of tryptamine measured at 16 hours (E. coli and S. cerevisiae) or 36 hours (C. reinhardtii, P. tricornutum, and S. limacinum) after the addition of tryptamine to the culture media. Relative growth calculated by comparing the cell density of each condition to the cell density of a corresponding control culture without supplemented tryptamine.

### DETAILED DESCRIPTION

### Tryptophan, Tryptamine, and Substituted Tryptamines

[0033] Tryptophan is a non-polar aromatic amino acid comprising an a-amino group, an α-carboxylic acid group, and a side chain indole. L-tryptophan is the L-isomer of tryptophan normally found in organisms. Tryptophan is derived from metabolites produced via glycolysis, the pentose phosphate pathway, and the shikimate pathway. Tryptophan synthase catalyzes the final steps of tryptophan synthesis. Tryptophan synthase consists of alpha and beta subunits. The alpha subunit catalyzes the formation of indole. The alpha subunit is responsible for the aldol cleavage of indoleglycerol phosphate that produces d-glyceraldehyde 3-phosphate and indole. The beta subunit catalyzes the formation of L-tryptophan from indole and serine. This reaction may use the indole created by the alpha subunit. The beta subunit is responsible for a pyridoxal phosphate (PLP)-dependent condensation of indole and L-serine into L-tryptophan.

[0034] The present disclosure provides a microorganism comprising an overexpressed tryptophan synthase. In some embodiments, the tryptophan synthase is endogenous and expression of the tryptophan synthase is increased by altering culture conditions. In some embodiments, the microorganism comprises an exogenous nucleic acid molecule that encodes an endogenous tryptophan synthase. In some embodiments, the microorganism comprises an exogenous nucleic acid molecule that encodes an exogenous tryptophan synthase, optionally the beta subunit of said tryptophan synthase. In some embodiments, the exogenous tryptophan synthase comprises an amino acid sequence with at least 80%, at least 85%, at least 90%, at least 95%, at least 99%, or 100% sequence identity to the sequence as shown in any of SEQ ID NOs: 19-22.

[0035] One or more metabolic pathways in a microorganism may be genetically modified to increase the endogenous production of tryptophan, thereby increasing the amount of the key precursor for the biosynthesis of tryptamine and subsequent biosynthesis of substituted tryptamines, by editing enzymes such as, for example, Aro1, Aro2, Aro3, Aro4, Trp1, Trp2, Trp3, Trp4, Trp5, Seri , Ser2, Ser3, GIn1 as disclosed in any of WO2019/180309, WO2021/110992, and WO2021/097452, the contents of which are incorporated herein by reference.

[0036] Tryptamine (FIG. 1) is a monoamine alkaloid comprising an indole ring joined to an amine group by an ethyl side chain at the 3-carbon of the pyrrole ring. Tryptamine may be synthesized by the decarboxylation of tryptophan. Decarboxylation of tryptophan into tryptamine may be performed enzymatically by the action of a tryptophan decarboxylase, such as the enzymes as shown in SEQ ID NOs: 1-3 and 23-35. Enzymatic decarboxylation of trypthophan can be performed in vitro by the incubation of tryptophan with a tryptophan decarboxylase, or in vivo by the endogenous or transgenic expression of a tryptophan decarboxylase in a microorganism to convert tryptophan into tryptamine. Decarboxylation of tryptophan into tryptamine may be performed by chemical decarboxylation or by thermolytic decarboxylation as known in the art (as disclosed for example in Laval and Golding, Synlett, 2003, 4:542-546, the contents of which are incorporated herein by reference). Tryptamine and substituted tryptamines may function in mammals as neurotransmitters and/or neuromodulators.

[0037] The present disclosure provides microorganisms capable of producing at least one substituted tryptamine. As used herein, the term “substituted tryptamine” refers to a molecule derived from tryptamine and may be used interchangeably with the term “tryptamine derivative”. In some embodiments, the substituted tryptamine comprises substitutions at one or more positions defined as 1, 2, 3, 4, 5, 6, 7, α, and/or β as shown in FIG. 1A or at one or more positions defined as Rα, R4, R5, RN1, and/or RN2 as shown in FIG. 1B. The term “substituted”, when used with an atom or group, refers to the designated atom or group where one or more hydrogen atoms on the atom or group is replaced with one or more substituents other than hydrogen, provided that the referred to atom or group's normal valence is not exceeded. A substituted tryptamine may be derived from tryptamine by substitution of a hydrogen for a functional group such as, but not limited to, an OH, an COOH, phosphate group, a methyl, a dimethyl allyl, or a halogen. A substituted tryptamine may be a molecule comprising an indole ring derived from tryptamine or a substituted tryptamine intermediate. In some embodiments, the substituted tryptamine is serotonin, N-acetyl serotonin, dimethylallyl tryptamine, lysergic acid diethylamide, N-methyltryptamine, N,N-Dimethyltryptamine, N,N,N-Trimethyltryptamine, N,N,N-Trimethyl-4-phosphoryloxytryptamine (aeruginascin), psilocybin, psilocin, baeocystin, norbaeocystin, 4-hydroxytryptamine, N-acetyl-4-hydroxytrptamine, gramine, clavine, indole-acetic acid, ateviridine, Pindolol, bufotenin, aurantioclavine, and/or a halogenated substituted tryptamine (e.g. a halogenated tryptamine, a dihalogenated tryptamine, a trihalogenated tryptamine, a halogenated N-methyltryptamine, a halogenated N,N-dimethyltryptamine, a halogenated N,N,N-trimethyltryptamine, a dihalogenated N-methyltryptamine, a dihalogenated N,N-dimethyltryptamine, a dihalogenated N,N,N-trimethyltryptamine, a trihalogenated N-methyltryptamine, a trihalogenated N,N-dimethyltryptamine or a trihalogenated N,N,N-trimethyltryptamine).

[0038] The present disclosure provides microorganisms comprising at least one nucleic acid molecule that encodes at least one substituted tryptamine biosynthetic pathway enzyme. As used herein, “substituted tryptamine biosynthetic pathway” refers to a biochemical pathway comprising one or more enzymatic steps that produces a substituted tryptamine. As used herein, “substituted tryptamine biosynthetic pathway enzyme” refers to an enzyme that produces tryptamine, a substituted tryptamine intermediate, or a substituted tryptamine by conversion of a substrate. A substituted tryptamine biosynthetic pathway may begin with the enzymatic conversion of L-tryptophan into tryptamine, with the enzymatic conversion of L-tryptophan into a substituted tryptamine intermediate, or the enzymatic conversion of L-tryptophan into a substituted tryptamine.

[0039] In some embodiments, the substituted tryptamine biosynthetic pathway is a biosynthetic pathway that is found to naturally occur in a microorganism. In some embodiments, the substituted tryptamine biosynthetic pathway recapitulates a biosynthetic pathway that is found to naturally occur in a microorganism but using analogous enzymes in place of the enzymes normally used in the naturally occurring pathway. In some embodiments, the substituted tryptamine biosynthetic pathway is a biosynthetic pathway that does not occur in nature.

### Microorganisms and Cell Culture

[0040] A microorganism may be genetically engineered to comprise at least one nucleic acid molecule encoding at least one substituted tryptamine biosynthetic pathway enzyme.

[0041] As used herein, the term “genetically engineered microorganism” refers to a microorganism whose genetic material has been altered using molecular biology techniques such as but not limited to molecular cloning, recombinant DNA methods, transformation and gene transfer. The genetically engineered microorganism includes a living modified microorganism, genetically modified microorganism or a transgenic microorganism. Genetic alteration includes addition, deletion, modification and/or mutation of genetic material. Such genetic engineering as described herein in the present disclosure may increase production of tryptophan, tryptamine, and/or a substituted tryptamine.

[0042] The term “nucleic acid molecule”, as used herein, is intended to include unmodified DNA or RNA or modified DNA or RNA. For example, it is useful for the nucleic acid molecules of the disclosure to be composed of single- and double-stranded DNA, DNA that is a mixture of single- and double-stranded regions, single- and double-stranded RNA, and RNA that is a mixture of single- and double-stranded regions, hybrid molecules comprising DNA and RNA that may be single-stranded or, more typically double-stranded or a mixture of single- and double-stranded regions. In addition, it is useful for the nucleic acid molecules to be composed of triple-stranded regions comprising RNA or DNA or both RNA and DNA. The nucleic acid molecules of the disclosure may also contain one or more modified bases or DNA or RNA backbones modified for stability or for other reasons. “Modified” bases include, for example, tritiated bases and unusual bases such as inosine. A variety of modifications can be made to DNA and RNA; thus “nucleic acid molecule” embraces chemically, enzymatically, or metabolically modified forms. The term “polynucleotide” shall have a corresponding meaning. In some embodiments, a genetically engineered microorganism comprises at least one nucleic acid molecule described herein.

[0043] As used herein, the term “exogenous” refers to an element that has been introduced into a cell. An exogenous element can include a protein or a nucleic acid. An exogenous nucleic acid is a nucleic acid that has been introduced into a cell, such as by a method of transformation. An exogenous nucleic acid may code for the expression of an RNA and/or a protein. An exogenous nucleic acid may have been derived from the same species (homologous) or from a different species (heterologous). An exogenous nucleic acid may comprise a homologous sequence that is altered such that it is introduced into the cell in a form that is not normally found in the cell in nature. For example, an exogenous nucleic acid that is homologous may contain mutations, being operably linked to a different control region, or being integrated into a different region of the genome, relative to the endogenous version of the nucleic acid. An exogenous nucleic acid may be incorporated into the chromosomes of the transformed cell in one or more copies, into the plastid or mitochondrial DNA of the transformed cell, or be maintained as a separate nucleic acid outside of the transformed cell genome.

[0044] The phrase “introducing a nucleic acid molecule into a microorganism” includes both the stable integration of the nucleic acid molecule into the genome of a microorganism to prepare a genetically engineered microorganism as well as the transient integration of the nucleic acid into microorganism. The introduction of a nucleic acid into a cell is also known in the art as transformation. The nucleic acid vectors may be introduced into the microorganism using techniques known in the art including, without limitation, agitation with glass beads, electroporation, agrobacterium-mediated transformation, an accelerated particle delivery method, i.e. particle bombardment, a cell fusion method or by any other method to deliver the nucleic acid vectors to a microorganism.

[0045] The term “nucleic acid sequence” as used herein refers to a sequence of nucleoside or nucleotide monomers consisting of naturally occurring bases, sugars and intersugar (backbone) linkages and includes cDNA. The term also includes modified or substituted sequences comprising non-naturally occurring monomers or portions thereof. The nucleic acid sequences of the present application may be deoxyribonucleic acid sequences (DNA) or ribonucleic acid sequences (RNA) and may include naturally occurring bases including adenine, guanine, cytosine, thymidine and uracil. The sequences may also contain modified bases. Examples of such modified bases include aza and deaza adenine, guanine, cytosine, thymidine and uracil; and xanthine and hypoxanthine. The nucleic acid can be either double stranded or single stranded, and represents the sense or antisense strand. Further, the term “nucleic acid” includes the complementary nucleic acid sequences.

[0046] A nucleic acid molecule may be incorporated into a vector. As used herein, the term “vector” or “nucleic acid vector” means a nucleic acid molecule, such as a plasmid, comprising regulatory elements and a site for introducing transgenic DNA (e.g. a nucleic acid molecule encoding at least one substituted tryptamine biosynthetic pathway enzyme), which is used to introduce said transgenic DNA into a microorganism. The transgenic DNA can encode a heterologous protein, which can be expressed in the microorganism. The transgenic DNA can be integrated into nuclear, mitochondrial or chloroplastic genomes through homologous or non-homologous recombination. The transgenic DNA can also replicate without integrating into nuclear, mitochondrial or chloroplastic genomes in an extra-chromosomal vector. The vector can contain a single, operably-linked set of regulatory elements that includes a promoter, a 5′ untranslated region (5′ UTR), an insertion site for transgenic DNA, a 3′ untranslated region (3′ UTR) and a terminator sequence. Vectors useful in the present methods are well known in the art. In one embodiment, the nucleic acid molecule is an episomal vector.

[0047] As used herein, the term “episomal vector” refers to a DNA vector based on a bacterial episome that can be expressed in a transformed cell without integration into the transformed cell genome by staying extrachromosomal. Episomal vectors can be transferred from a bacteria (e,g, Escherichia col') to another target microorganism (e.g. a microalgae) via conjugation or by purification and mechanical introduction such as electroporation.

[0048] In another embodiment, the vector is a commercially available vector. As used herein, the term “expression cassette” means a single, operably-linked set of regulatory elements that includes a promoter, a 5′ untranslated region (5′ UTR), an insertion site for transgenic DNA, a 3′ untranslated region (3′ UTR) and a terminator sequence. In an embodiment, the at least one nucleic acid molecule is an episomal vector.

[0049] The term “operably-linked”, as used herein, refers to an arrangement of two or more components, wherein the components so described are in a relationship permitting them to function in a coordinated manner. For example, a transcriptional regulatory sequence or a promoter is operably-linked to a coding sequence if the transcriptional regulatory sequence or promoter facilitates aspects of the transcription of the coding sequence. The skilled person can readily recognize aspects of the transcription process, which include, but not limited to, initiation, elongation, attenuation and termination. In general, an operably-linked transcriptional regulatory sequence joined in cis with the coding sequence, but it is not necessarily directly adjacent to it.

[0050] Vectors encoding at least one substituted tryptamine biosynthetic pathway enzyme may contain elements suitable for the proper expression of the enzyme in the microorganism. Specifically, each expression vector contains a promoter that promotes transcription in microorganisms. The term “promoter,” as used herein, refers to a nucleotide sequence that directs the transcription of a gene or coding sequence to which it is operably-linked. The skilled person can readily appreciate inducible promoters including chemically-inducible promoters, alcohol inducible promoters, and estrogen inducible promoters can also be used. Predicted promoters, such as those that can be found from genome database mining may also be used. In addition, the nucleic acid molecule or vector may contain one or more introns in front of the cloning site or within a gene sequence to drive a strong expression of the gene of interest. Selectable marker genes can also be linked on the vector, such as the kanamycin resistance gene (also known as neomycin phosphotransferase gene II, or nptII), zeocin resistance gene, hygromycin resistance gene, Basta resistance gene, hygromycin resistance gene, or others.

[0051] Nucleic acid sequences encoding substituted tryptamine biosynthetic pathway enzymes as described herein can be provided in vectors in different arrangements or combinations. Each individual sequence that encodes an enzyme of a cannabinoid biosynthetic pathway can be provided in separate vectors. Alternatively, multiple sequences can be provided together in the same vector.

[0052] Where more than one sequence that encodes an enzyme is provided in the same vector, the sequences can be provided in separate expression cassettes, or together in the same expression cassette. Where two or more sequences are in the same expression cassette, they can be provided in the same open reading frame so as to produce a fusion protein. Two or more sequences that encode a fusion protein can be separated by linker sequences that encode restriction nuclease recognition sites or self-cleaving peptide linkers. Accordingly, a microorganism can be engineered by stepwise transfection with multiple vectors that each comprises nucleic acid molecules that encode one or more enzymes of a substituted tryptamine biosynthetic pathway, or with a single vector that comprises nucleic acid molecules that encode all of the enzymes of a substituted tryptamine biosynthetic pathway.

[0053] Microorganisms may be cultured in conditions that are permissive to their growth. It is known that photosynthetic microorganisms such as microalgae and cyanobacteria are capable of carbon fixation wherein carbon dioxide (which is not a fixed carbon source) is fixed into organic molecules such as sugars using energy from a light source. The fixation of carbon dioxide using energy from a light source is photosynthesis. Suitable sources of light for the provision of energy in photosynthesis include sunlight and artificial lights. Photosynthetic microorganisms are capable of growth and/or metabolism without a fixed carbon source. Photosynthetic microorganisms can fix carbon dioxide from a variety of sources, including atmospheric carbon dioxide, industrially-discharged carbon dioxide (e.g. flue gas and flaring gas), and from soluble carbonates (e.g. NaHCO3 and Na2CO3). A non-fixed carbon source such as carbon dioxide can be added to a culture of microalgae by injection or by bubbling of a carbon dioxide gas mixture into the culture medium. Photosynthetic growth is a form of autotrophic growth, wherein a microorganism is able to produce organic molecules on its own using an external energy source such as light. This is in contrast to heterotrophic growth, wherein a microorganism must consume organic molecules for growth and/or metabolism. Heterotrophic microorganisms therefore require a fixed carbon source for growth and/or metabolism. Some photosynthetic microorganisms are capable of mixotrophic growth, wherein the microorganism fixes carbon by photosynthesis while also consuming fixed carbon sources. In mixotrophic growth, the autotrophic metabolism is integrated with a heterotrophic metabolism that oxidizes reduced carbon sources available in the culture medium. Photosynthetic microorganisms are commonly cultivated in mixotrophic conditions by adding fixed carbon sources as described herein to the culture medium. Common sources of fixed carbon that are used include glucose, ethanol, or waste products from industry such as acetate or glycerol. Microorganisms such as microalgae and cyanobacteria may be cultured using methods and conditions known in the art. Some microorganisms are capable of chemoautotrophic growth, Similar to photosynthetic microorganisms, chemoautotrophic organisms are capable of carbon dioxide fixation but using energy derived from chemical sources (e.g. hydrogen sulfide, ferrous iron, molecular hydrogen, ammonia) rather than light.

[0054] In some embodiments, culture conditions of a microorganism may be altered to induce overexpression of a tryptophan synthase in the microorganism. In some embodiments, culture conditions of a microorganism may be altered to induce overexpression of an endogenous tryptophan synthase in the microorganism. In some embodiments, the altered culture conditions comprise nutrient limitation (e.g. phosphate deprivation, nitrogen deprivation, iron deprivation) and/or light deprivation (e.g. withdrawal of light sources, switching of light source spectra).

[0055] As used herein, “overexpression” refers to elevated expression of a gene or polypeptide in a genetically engineered microorganism compared to a corresponding wild-type microorganism, or to elevated expression of a gene or polypeptide in a microorganism cultured in altered conditions compared to a corresponding microorganism cultured under normal or control conditions.

[0056] In some embodiments, the microorganism may be a microalga, a stramenopile, a cyanobacterium, a bacterium, a protist, or a fungus.

[0057] In some embodiments, the microalga is a species from Chlorophyceae, Trebouxiophyxeae, Coscinodiscophyceae, Bacillariphyceae, Eustigmatophyceae, or Labyrinthylomycetes. In some embodiments the microalga is a species from Chlamydomonales, Chlorellales, Thalassiosirales, Baccilariales, Eustigmatales, or Labyrinthulales. In some embodiments, the microalga is a species from Acutodesmus, Ankistrodesmus, Asteromonas, Aurantiochytrium, Auxenochlorella, Basichlamys, Botryococcus, Botryokoryne, Borodinella, Brachiomonas, Catena, Carteria, Chaetophora, Characiochloris, Characiosiphon, Chlainomonas, Chlamydomonas, Chlorella, Chlorochytrium, Chlorococcum, Chlorogonium, Chloromonas, Closteriopsis, Dictyochloropsis, Dunaliella, Ellipsoidon, Eremosphaera, Eudorina, Floydiella, Friedmania, Haematococcus, Hafniomonas, Heterochlorella, Gonium, Halosarcinochlamys, Koliella, Lobocharacium, Lobochlamys, Lobomonas, Lobosphaera, Lobosphaeropsis, Marvania, Monoraphidium, Myrmecia, Nannochloris, Nannochloropsis, Oocystis, Oogamochlamys, Pabia, Pandorina, Parietochloris, Phacotus, Phaeodactylum, Platydorina, Platymonas, Pleodorina, Polulichloris, Polytoma, Polytomella, Prasiola, Prasiolopsis, Prasiococcus, Prototheca, Pseudochlorella, Pseudocarteria, Pseudotrebouxia, Pteromonas, Pyrobotrys, Rosenvingiella, Scenedesmus, Schizochytrium, Spirogyra, Stephanosphaera, Tetrabaena, Tetraedron, Tetraselmis, Thalassiosira, Thraustochytium, Trebouxia, Trochisciopsis, Ulkenia, Viridiella, Vitreochlamys, Volvox, Volvulina, Vulcanochloris, Watanabea, Yamagishiella, Euglena, lsochrysis, or Nannochloropsis. In an embodiment, the microalga is Chlamydomonas reinhardtii, Chlorella vulgaris, Chlorella sorokiniana, Chlorella protothecoides, Tetraselmis chuff, Nannochloropsis oculata, Phaeodactylum tricornutum, Thalassiosira pseudonana, Prototheca moriformis, Scenedesmus obliquus, Acutodesmus dimorphus, Schizochytrium limacinum, Dunaliella tertiolecta, Aurantiochytrium sp., Thraustochytrium sp., Ulkenia sp., or Haematococus plucialis. In another embodiment, the microalga is a diatom, optionally Phaeodactylum tricornutum or Thalassiosira pseudonana.

[0058] In some embodiments, the stramenopile is a species from Coscinodiscophyceae, Bacillariphyceae, Eustigmatophyceae, or Labyrinthylomycetes. In some embodiments, the stramenopile is a species from Thalassiosirales, Baccilariales, Eustigmatales, or Labyrinthulales. In some embodiments, the stramenoplie is a species from Thalassiosira, Phaeodactylum, Nannochloropsis, Schizochytrium Aurantiochytrium, Thraustochytrium, or Ulkenia. In an embodiment, the stramenopile is Nannochloropsis oculata, Phaeodactylum tricornutum, Thalassiosira pseudonana, Schizochytrium limacinum, Schizochytrium sp., Aurantiochytrium sp., Thraustochytrium sp., or Ulkenia sp.

[0059] In some embodiments, the cyanobacterium is from Spirulinaceae, Phormidiaceae, Synechococcaceae, or Nostocaceae. In an embodiment, the cyanobacterium is Arthrospira plantesis, Arthrospira maxima, Synechococcus elongatus, or Aphanizomenon flos-aquae.

[0060] In some embodiments, the microorganism is a bacterium, for example from the genera Escherichia, Bacillus, Caulobacter, Mycoplasma, Pseudomonas, Streptomyces, or Zymomonas.

[0061] In some embodiments, the microorganism is a protist, for example from the genera Dictyostelium, Tetrahymena, Emiliania.

[0062] In some embodiments, the microorganism is a fungus, for example from the genera Aspergillus, Saccharomyces, Schizosaccharomyces, or Fusarium.

[0063] In some embodiments, the microorganism is a microalga. Without being bound by theory, it is believed that microalgae possess advantageous properties for the biosynthesis of substituted tryptamines. Compared to yeast and bacteria, microalgae contain higher concentrations of cofactors needed for tryptophan decarboxylase and tryptamine monooxygenase activity such as pyridoxal phosphate (PLP) (De Roeck-Holtzhauer et al., J Appl Phycol, 1991, 3:259-264; Dempsey et al., J. Bacteriol., 1971, 108(1):415-421). Further, compared to yeast and bacteria, the cytosol of microalgae is a less oxidative environment that improves the activity of enzymes such as N-methyltransferases and indole-ethylamine methyltransferases that catalyze the transfer of methyl groups to produce substituted tryptamines such as, for example, psilocybin, psilocyn, bufotenine, aeruginascin, and N,N-dimethyltryptamine.

[0064] In some embodiments, the microorganism is a microalga or a stramenopile. It was surprisingly discovered by the present inventors that microalgae and stramenopiles are tolerant of high concentrations of tryptamine that kill or severely restrict growth of yeast and bacteria. Therefore, microalgae and stramenopiles are suitable for high-yield biosynthesis of substituted tryptamines in culture with high concentrations of supplemented tryptamine.

[0065] Tryptamine is the key precursor of substituted tryptamine biosynthetic pathways. The in vivo synthesis of tryptophan and/or the in vivo synthesis of tryptamine by enzymatic decarboxylation of tryptophan may be rate-limiting steps that limit the final yield of biosynthetically-produced substituted tryptamines in microorganisms. In some embodiments, microorganisms comprising at least one nucleic acid molecule encoding at least one substituted tryptamine biosynthetic pathway enzyme may be cultured in media supplemented with tryptamine to increase the yield of a substituted tryptamine. Further, supplementation with tryptamine may obviate the need to overexpress an endogenous trypthophan decarboxylase or to introduce an exogenous tryptophan decarboxylase into a microorganism comprising at least one nucleic acid molecule encoding at least one substituted tryptamine biosynthetic pathway enzyme, reducing the amount of genetic modification required. In some embodiments, microorganisms comprising at least one nucleic acid molecule encoding at least one substituted tryptamine biosynthetic pathway enzyme may be cultured in media with a high concentration of tryptamine for the high-yield biosynthesis of substituted tryptamines.

[0066] In some embodiments, there is provided a cell culture comprising (i) a microalga comprising at least one nucleic acid molecule that encodes at least one substituted tryptamine biosynthetic pathway enzyme and (ii) a culture media supplemented with a high concentration of tryptamine. In some embodiments, there is provided a cell culture comprising (i) a stramenopile comprising at least one nucleic acid molecule that encodes at least one substituted tryptamine biosynthetic pathway enzyme and (ii) a culture media supplemented with a high concentration of tryptamine.

[0067] High concentrations of tryptamine may be toxic to microorganisms, reducing their viability and growth rates and subsequently the yield of substituted tryptamine. In some embodiments, a high concentration of supplemented tryptamine is at least about 1 mM, 2 mM, 3 mM, 4 mM, 5 mM, 6 mM, 7 mM, 9 mM, or 10 mM of tryptamine in the culture media. In some embodiments, microorganisms comprising at least one nucleic acid molecule encoding at least one substituted tryptamine biosynthetic pathway enzyme must be tolerant of high concentrations of tryptamine.

[0068] In some embodiments, microorganisms that are tolerant of high concentrations of tryptamine may maintain at least 15%, at least 20%, at least 25%, at least 30%, at least 35%, at least 40%, at least 45%, at least 50%, at least 55%, at least 60%, at least 65%, at least 70%, at least 75%, at least 80%, at least 85%, at least 90%, and least 95%, or at least 99% cell viability when cultured with a high concentration of supplemented tryptamine during the log phase and/or the stationary phase, for example, the log phase. In some embodiments, microorganisms that are tolerant of high concentrations of tryptamine may maintain at least 75%, at least 80%, at least 85%, at least 90%, at least 95%, at least 99%, or 100% of the growth rate when cultured with a high concentration of supplemented tryptamine relative to the growth rate when cultured without supplemented tryptamine during the log phase and/or the stationary phase, for example, the log phase.

[0069] In some embodiments, a microorganism that is tolerant of high concentrations of tryptamine is a microalga. In some embodiments, a microorganism that is tolerant of high concentrations of tryptamine is a stramenopile. In some embodiments, a microorganism that is tolerant of high concentrations of tryptamine is a species of Bacillariophyceae, Eustigmatophyceae, or Labyrinthulomycetes. In some embodiments, a microorganism that is tolerant of high concentrations of tryptamine is Chlamydomonas reinhardtii, Chlorella vulgaris, Chlorella sorokiniana, Chlorella protothecoides, Tetraselmis chuff, Nannochloropsis australis, Nannochloropsis gaditana, Nannochloropsis granulata, Nannochloropsis limnetica, Nannochloropsis oceanica, Nannochloropsis oculata, Nannochloropsis salina, Phaeodactylum tricornutum, Thalassiosira pseudonana, Prototheca moriformis or Schizochytrium limacinum.

[0070] Many media for the culture of microorganisms are known in the art and which are suitable for use in culturing the microorganisms described herein including, but not limited to, F/2 media, L1 media, Tris acetate phosphate (TAP), or Bold's Basal Medium (BBM), as disclosed in de Carvalho et al., Biofuels from Algae (Second Edition), Elsevier, 2019, 33-50, the contents of which are incorporated herein by reference.

### Substituted Tryptamine Biosynthetic Pathways

[0071] In some embodiments, the substituted tryptamine is psilocybin. Psilocybin is a substituted tryptamine (FIG. 1A) wherein Rα=H, R4=PO₄, R5=H, RN1=CH₃, RN2=CH₃. In some embodiments, a microorganism provided herein comprises at least one nucleic acid molecule that encodes at least one substituted tryptamine biosynthetic pathway enzyme, wherein the at least one substituted tryptamine biosynthetic pathway enzyme comprises a tryptophan decarboxylase, a tryptamine 4-monooxygenase, a 4-hydroxytryptamine kinase, and an N-methyltransferase. In some embodiments, a microorganism provided herein comprises at least one nucleic acid molecule that encodes at least one substituted tryptamine biosynthetic pathway enzyme, wherein the at least one substituted tryptamine biosynthetic pathway enzyme comprises a tryptamine 4-monooxygenase, a 4-hydroxytryptamine kinase, and an N-methyltransferase, and wherein the microorganism does not comprise an exogenous nucleic acid molecule that encodes a tryptophan decarboxylase.

[0072] An exemplary substituted tryptamine biosynthetic pathway for psilocybin is shown in FIG. 2. L-tryptophan is decarboxylated by the activity of a tryptophan decarboxylase to form tryptamine. An OH group is transferred to the 4-carbon by the activity of a tryptamine 4-monooxygenase to form 4-hydroxytryptamine. A phosphate group is transferred to 4-hydroxytryptamine by the activity of a 4-hydroxytryptamine kinase to form norbaeocystin. Iterative methyl transfer to the amine group of norbaeocystin by the activity of an N-methyltransferase forms the monomethylated intermediate baeocystin and then psilocybin. Dephosphorylation of psilocybin either spontaneously or by the action of a phosphatase produces psilocin. Phosphorylation of psilocin by a 4-hydroxytryptamine kinase again produces psilocin. When tryptamine is already present (e.g. due to supplementation) the substituted tryptamine biosynthetic pathway for psilocybin does not require a tryptophan decarboxylase and begins with the activity of a tryptamine 4-monooxygenase.

[0073] A tryptophan decarboxylase is a substituted tryptamine biosynthetic pathway enzyme capable of removing the carboxyl from L-tryptophan to produce tryptamine. In some embodiments, the tryptophan decarboxylase is a polypeptide comprising an amino acid sequence with at least 80%, at least 85%, at least 90%, at least 95%, at least 99%, or 100% sequence identity to the sequence as shown in any of SEQ ID NOs: 1-3 and 23-35.

[0074] A tryptamine 4-monooxygenase is a substituted tryptamine biosynthetic pathway enzyme capable of transferring an OH group to the 4-carbon of tryptamine. In some embodiments, the tryptamine 4-monooxygenase is a polypeptide comprising an amino acid sequence with at least 80%, at least 85%, at least 90%, at least 95%, at least 99%, or 100% sequence identity to the sequence as shown in any of SEQ ID NOs: 4-7 and 36-42. The activity of a tryptamine 4-monooxygenase in a microorganism as described herein may be enhanced by co-expression with a cytochrome p450 reductase as shown in SEQ ID NO: 108.

[0075] A 4-hydroxytryptamine kinase is a substituted tryptamine biosynthetic pathway enzyme capable of 4-0 phosphorylation of 4-hydroxytryptamine. In some embodiments, the 4-hydroxytryptamine kinase is a polypeptide comprising an amino acid sequence with at least 80%, at least 85%, at least 90%, at least 95%, at least 99%, or 100% sequence identity to the sequence as shown in any of SEQ ID NOs: 8-12 and 43-59.

[0076] An N-methyltransferase is a substituted tryptamine biosynthetic pathway enzyme capable of iterative methyl transfer to the amine group of norbaeocsytin/baeocystin. In some embodiments, the N-methyltransferase is a polypeptide comprising an amino acid sequence with at least 80%, at least 85%, at least 90%, at least 95%, at least 99%, or 100% sequence identity to the sequence as shown in any of SEQ ID NOs: 13-14 and 109-321.

[0077] In some embodiments, a microorganism for use in the production of psilocybin comprises at least one nucleic acid molecule encoding a tryptophan decarboxylase as shown in any of SEQ ID NOs: 1-3 and 23-35, a tryptamine 4-monooxygenase as shown in any of SEQ ID NOs: 4-7 and 39-42, a 4-hydroxytryptamine kinase as shown in any of SEQ ID NOs: 8-12 and 43-59, and an N-methyltransferase as shown in any of SEQ ID NOs: 13-14 and 109-321, or a polypeptide at least 80% identical to any thereof. When tryptamine is already present (e.g. due to supplementation) the at least one nucleic acid molecule may exclude a trypthophan decarboxylase.

[0078] In some embodiments, the substituted tryptamine is serotonin. Serotonin is a substituted tryptamine (FIG. 1A) wherein Rα=H, R4=H, R5=OH, RN1=H, RN2=H. In some embodiments, a microorganism provided herein comprises at least one nucleic acid molecule that encodes at least one substituted tryptamine biosynthetic pathway enzyme, wherein the at least one substituted tryptamine biosynthetic pathway enzyme comprises a tryptophan decarboxylase and a tryptamine 5-hydroxylase. In some embodiments, a microorganism provided herein comprises at least one nucleic acid molecule that encodes at least one substituted tryptamine biosynthetic pathway enzyme, wherein the at least one substituted tryptamine biosynthetic pathway enzyme comprises tryptamine 5-hydroxylase, and wherein the microorganism does not comprise an exogenous nucleic acid molecule that encodes a tryptophan decarboxylase.

[0079] An exemplary substituted tryptamine biosynthetic pathway for serotonin is shown in FIG. 3 (left pathway). L-tryptophan is decarboxylated by the activity of a tryptophan decarboxylase to form tryptamine. An OH group is transferred to the 5-carbon by the activity of a tryptamine 5-hydroxylase to form serotonin. When tryptamine is already present (e.g. due to supplementation) the substituted tryptamine biosynthetic pathway for serotonin does not require a tryptophan decarboxylase and begins with the activity of a tryptamine 5-hydroxylase.

[0080] A tryptamine 5-hydroxylase (also known as a tryptamine 5-monooxygenase) is a substituted tryptamine biosynthetic pathway enzyme capable of transferring an OH group to the 5-carbon of tryptamine. In some embodiments, the tryptamine 5-hydroxylase is a polypeptide comprising an amino acid sequence with at least 80%, at least 85%, at least 90%, at least 95%, at least 99%, or 100% sequence identity to the sequence as shown in SEQ ID NO: 15.

[0081] In some embodiments, the substituted tryptamine is N,N-dimethyltryptamine (DMT). DMT is a substituted tryptamine (FIG. 1A) wherein Rα=H, R4=H, R5=H, RN1=CH3, RN2=CH₃. In some embodiments, a microorganism provided herein comprises at least one nucleic acid molecule that encodes at least one substituted tryptamine biosynthetic pathway enzyme, wherein the at least one substituted tryptamine biosynthetic pathway enzyme comprises a tryptophan decarboxylase and an indole-ethylamine methyltransferase (INMT). In some embodiments, a microorganism provided herein comprises at least one nucleic acid molecule that encodes at least one substituted tryptamine biosynthetic pathway enzyme, wherein the at least one substituted tryptamine biosynthetic pathway enzyme comprises an indole-ethylamine methyltransferase (INMT), and wherein the microorganism does not comprise an exogenous nucleic acid molecule that encodes a tryptophan decarboxylase.

[0082] An exemplary substituted tryptamine biosynthetic pathway for DMT is shown in FIG. 3 (right pathway). L-tryptophan is decarboxylated by the activity of a tryptophan decarboxylase to form tryptamine. Iterative methyl transfer to the amine group of tryptamine by the activity of an indole-ethylamine methyltransferase forms the monomethylated intermediate N-methyltryptamine and then DMT. When tryptamine is already present (e.g. due to supplementation) the substituted tryptamine biosynthetic pathway for DMT does not require a tryptophan decarboxylase and begins with the activity of an INMT.

[0083] An indole-ethylamine methyltransferase is a substituted tryptamine biosynthetic pathway enzyme capable of iterative methyl transfer to the amine group of tryptamine/N-methyltryptamine. In some embodiments, the indole-ethylamine methyltransferase is a polypeptide comprising an amino acid sequence with at least 80%, at least 85%, at least 90%, at least 95%, at least 99%, or 100% sequence identity to the sequence as shown in any of SEQ ID NOs: 16 and 60-98.

[0084] In some embodiments, a microorganism provided herein comprises at least one nucleic acid molecule that encodes at least one substituted tryptamine biosynthetic pathway enzyme, wherein the at least one substituted tryptamine biosynthetic pathway enzyme comprises a tryptophan decarboxylase, a tryptamine 4-monooxygenase, a 4-hydroxytryptamine kinase, an N-methyltransferase, and a tryptamine 5-hydroxylase, and is capable of producing psilocybin and/or serotonin. In some embodiments, a microorganism provided herein comprises at least one nucleic acid molecule that encodes at least one substituted tryptamine biosynthetic pathway enzyme, wherein the at least one substituted tryptamine biosynthetic pathway enzyme comprises a tryptamine 4-monooxygenase, a 4-hydroxytryptamine kinase, an N-methyltransferase, and a tryptamine 5-hydroxylase, and is capable of producing psilocybin and/or serotonin, and wherein the microorganism does not comprise an exogenous nucleic acid molecule that encodes a tryptophan decarboxylase.

[0085] In some embodiments, a microorganism provided herein comprises at least one nucleic acid molecule that encodes at least one substituted tryptamine biosynthetic pathway enzyme, wherein the at least one substituted tryptamine biosynthetic pathway enzyme comprises a tryptophan decarboxylase, a tryptamine 4-monooxygenase, a 4-hydroxytryptamine kinase, an N-methyltransferase, and an indole-ethylamine methyltransferase (INMT), and is capable of producing psilocybin and/or DMT. In some embodiments, a microorganism provided herein comprises at least one nucleic acid molecule that encodes at least one substituted tryptamine biosynthetic pathway enzyme, wherein the at least one substituted tryptamine biosynthetic pathway enzyme comprises a tryptamine 4-monooxygenase, a 4-hydroxytryptamine kinase, an N-methyltransferase, and an indole-ethylamine methyltransferase (INMT), and is capable of producing psilocybin and/or DMT, and wherein the microorganism does not comprise an exogenous nucleic acid molecule that encodes a tryptophan decarboxylase.

[0086] In some embodiments, a microorganism provided herein comprises at least one nucleic acid molecule that encodes at least one substituted tryptamine biosynthetic pathway enzyme, wherein the at least one substituted tryptamine biosynthetic pathway enzyme comprises a tryptophan decarboxylase, a tryptamine 4-monooxygenase, a 4-hydroxytryptamine kinase, an N-methyltransferase, a tryptamine 5-hydroxylase, and an indole-ethylamine methyltransferase (INMT), and is capable of producing psilocybin, serotonin and/or DMT. In some embodiments, a microorganism provided herein comprises at least one nucleic acid molecule that encodes at least one substituted tryptamine biosynthetic pathway enzyme, wherein the at least one substituted tryptamine biosynthetic pathway enzyme comprises a tryptamine 4-monooxygenase, a 4-hydroxytryptamine kinase, an N-methyltransferase, a tryptamine 5-hydroxylase, and an indole-ethylamine methyltransferase (INMT), and is capable of producing psilocybin, serotonin and/or DMT, and wherein the microorganism does not comprise an exogenous nucleic acid molecule that encodes a tryptophan decarboxylase.

[0087] In some embodiments, the substituted tryptamine is psilocybin. In some embodiments, a microorganism provided herein comprises at least one nucleic acid molecule that encodes at least one substituted tryptamine biosynthetic pathway enzyme, wherein the at least one substituted tryptamine biosynthetic pathway enzyme comprises a tryptophan decarboxylase, an indole-ethylamine methyltransferase (INMT), a tryptamine 4-monooxygenase, and a 4-hydroxytryptamine kinase. In some embodiments, a microorganism provided herein comprises at least one nucleic acid molecule that encodes at least one substituted tryptamine biosynthetic pathway enzyme, wherein the at least one substituted tryptamine biosynthetic pathway enzyme comprises an indole-ethylamine methyltransferase (INMT), a tryptamine 4-monooxygenase, and a 4-hydroxytryptamine kinase, and wherein the microorganism does not comprise an exogenous nucleic acid molecule that encodes a tryptophan decarboxylase.

[0088] Exemplary substituted tryptamine biosynthetic pathways comprising indole-ethylamine methyltransferase for the production of psilocybin are shown in FIG. 4. In one pathway (FIG. 4, right), L-tryptophan is decarboxylated by the activity of a tryptophan decarboxylase to form tryptamine. Iterative methyl transfer to the amine group of tryptamine by the activity of an indole-ethylamine methyltransferase forms the monomethylated intermediate N-methyltryptamine and then DMT. An OH group is transferred to the 4-carbon of DMT by the activity of a tryptamine 4-monooxygenase to form psilocin. A phosphate group is transferred to psilocin by the activity of a 4-hydroxytryptamine kinase to form psilocybin. In another pathway (FIG. 4, left), L-tryptophan is decarboxylated by the activity of a tryptophan decarboxylase to form tryptamine. An OH group is transferred to the 4-carbon by the activity of a tryptamine 4-monooxygenase to form 4-hydroxytryptamine. A phosphate group is transferred to 4-hydroxytryptamine by the activity of a 4-hydroxytryptamine kinase to form norbaeocystin. Iterative methyl transfer to the amine group of norbaeocystin by the activity of an indole-ethylamine methyltransferase forms the monomethylated intermediate baeocystin and then psilocybin. When tryptamine is already present (e.g. due to supplementation) the substituted tryptamine biosynthetic pathways comprising indole-ethylamine methyltransferase for the production of psilocybin do not require a tryptophan decarboxylase and begins with the activity of an INMT or tryptamine 4-monooxygenase.

[0089] In some embodiments, the substituted tryptamine is dimethylallyl tryptamine. In some embodiments, a microorganism provided herein comprises at least one nucleic acid molecule that encodes at least one substituted tryptamine biosynthetic pathway enzyme, wherein the at least one substituted tryptamine biosynthetic pathway enzyme comprises a dimethylallyl tryptamine synthase. Dimethylallyl tryptamine is a useful precursor for the synthesis of indole-containing molecules such as lysergic acid dimethylamide (LSD). L-tryptophan is converted to dimethylallyl-tryptamine by the activity of a dimethylallyl tryptamine synthase. Dimethylallyl-tryptamine is a substituted tryptamine (FIG. 1A) wherein Rα=COOH, R4=dimethyl allyl, R5=H, RN1=H, RN2=H.

[0090] A dimethylallyl tryptamine synthase is a substituted tryptamine biosynthetic pathway enzyme capable of converting L-tryptophan into dimethylallyl-tryptamine. In some embodiments, the dimethylallyl tryptamine synthase is a polypeptide comprising an amino acid sequence with at least 80%, at least 85%, at least 90%, at least 95%, at least 99%, or 100% sequence identity to the sequence as shown in SEQ ID NO: 17.

[0091] In some embodiments, the substituted tryptamine is aurantioclavine. In some embodiments, a microorganism provided herein comprises at least one nucleic acid molecule that encodes at least one substituted tryptamine biosynthetic pathway enzyme, wherein the at least one substituted tryptamine biosynthetic pathway enzyme comprises a dimethylallyl tryptamine synthase and an aurantioclavine synthase.

[0092] An exemplary substituted tryptamine biosynthetic pathway for aurantioclavine is shown in FIG. 5. L-tryptophan is converted to dimethylallyl-tryptamine by the activity of a dimethylallyl tryptamine synthase. Dimethylallyl-tryptamine is converted to aurantioclavine by the activity of aurantioclavine synthase.

[0093] An aurantioclavine synthase is a substituted tryptamine biosynthetic pathway enzyme capable of converting dimethylallyl tryptamine into aurantioclavine. In some embodiments, the aurantioclavine synthase is a polypeptide comprising an amino acid sequence with at least 80%, at least 85%, at least 90%, at least 95%, at least 99%, or 100% sequence identity to the sequence as shown in SEQ ID NO: 18.

[0094] In some embodiments, the substituted tryptamine is bufotenin (5-hydroxy-N,N-dimethyltryptamine). In some embodiments, a microorganism provided herein comprises at least one nucleic acid molecule that encodes at least one substituted tryptamine biosynthetic pathway enzyme, wherein the at least one substituted tryptamine biosynthetic pathway enzyme comprises a tryptophan decarboxylase, a tryptamine 5-hydroxylase, and an INMT. In some embodiments, a microorganism provided herein comprises at least one nucleic acid molecule that encodes at least one substituted tryptamine biosynthetic pathway enzyme, wherein the at least one substituted tryptamine biosynthetic pathway enzyme comprises a tryptamine 5-hydroxylase and an INMT, and wherein the microorganism does not comprise an exogenous nucleic acid molecule that encodes a tryptophan decarboxylase.

[0095] An exemplary substituted tryptamine biosynthetic pathway for bufotenin is shown in FIG. 6. L-tryptophan is decarboxylated by the activity of a tryptophan decarboxylase to form tryptamine. An OH group is transferred to the 5-carbon by the activity of a tryptamine 5-hydroxylase to form serotonin. Iterative methyl transfer to the amine group of serotonin by the activity of an indole-ethylamine methyltransferase forms bufotenin. When tryptamine is already present (e.g. due to supplementation) the substituted tryptamine biosynthetic pathway for bufotenindoes not require a tryptophan decarboxylase and begins with the activity of a tryptamine 5-hydroxylase.

[0096] In some embodiments, the substituted tryptamine is aeruginascin (N,N,N-trimethyl-4-phosphoryloxytryptamine). In some embodiments, a microorganism provided herein comprises at least one nucleic acid molecule that encodes at least one substituted tryptamine biosynthetic pathway enzyme, wherein the at least one substituted tryptamine biosynthetic pathway enzyme comprises a tryptophan decarboxylase, a tryptamine 4-monooxygenase, a 4-hydroxytryptamine kinase, and either an N-methyltransferase or an indole-ethylamine methyltransferase , wherein the N-methyltransferase or the indole-ethylamine methyltransferase is overexpressed and/or present in multiple copies. In some embodiments, a microorganism provided herein comprises at least one nucleic acid molecule that encodes at least one substituted tryptamine biosynthetic pathway enzyme, wherein the at least one substituted tryptamine biosynthetic pathway enzyme comprises a tryptamine 4-monooxygenase, a 4-hydroxytryptamine kinase, and either an N-methyltransferase or an indole-ethylamine methyltransferase, wherein the N-methyltransferase or indole-ethylamine methyltransferase is overexpressed and/or present in multiple copies, and wherein the microorganism does not comprise an exogenous nucleic acid molecule that encodes a tryptophan decarboxylase.

[0097] In some embodiments, the substituted tryptamine is a halogenated substituted tryptamine (e.g. a halogenated tryptamine, a dihalogenated tryptamine, a trihalogenated tryptamine, a halogenated N-methyltryptamine, a halogenated N,N-dimethyltryptamine, a halogenated N,N,N-trimethyltryptamine, a dihalogenated N-methyltryptamine, a dihalogenated N,N-dimethyltryptamine, a dihalogenated N,N,N-trimethyltryptamine, a trihalogenated N-methyltryptamine, a trihalogenated N,N-dimethyltryptamine or a trihalogenated N,N,N-trimethyltryptamine). In some embodiments, a microorganism provided herein comprises at least one nucleic acid molecule that encodes at least one substituted tryptamine biosynthetic pathway enzyme, wherein the at least one substituted tryptamine biosynthetic pathway enzyme comprises a tryptophan halogenase and a tryptophan decarboxylase.

[0098] A tryptophan halogenase is a substituted tryptamine biosynthetic pathway enzyme capable of transferring a halogen group onto L-tryptophan. Tryptophan halogenases may be regioselective, transferring the halogen group to a specific carbon on the indole of tryptophan. A tryptophan halogenase may be a tryptophan-2-halogenase, a tryptophan-5-halogenase, a tryptophan-6-halogenase, or a tryptophan-7-halogenase that transfers a halogen group to the 2, 5, 6, or 7 carbon (as shown in FIG. 1A) of the indole of L-tryptophan. In some embodiments, tryptophan halogenase is a polypeptide comprising an amino acid sequence with at least 80%, at least 85%, at least 90%, at least 95%, at least 99%, or 100% sequence identity to the sequence as shown in any of SEQ ID NOs: 99-106. The activity of a tryptophan halogenase may be enhanced by co-expression in a microorganism as described herein with a flavin reductase as shown in SEQ ID NO: 107.

[0099] In a biosynthetic pathway for a halogenated substituted tryptamine, a tryptophan halogenase catalyzes the transfer of a halogen group (e.g. a fluorine, a chlorine, a bromine, or an iodine) onto L-tryptophan to produce a halogenated L-tryptophan. Mono-, di-, or tri-halogenated trytophan may be produced by using one, two, or three separate regioselective tryptophan halogenases. Decarboxylation of the halogenated tryptophan by a tryptophan decarboxylase produces a halogenated tryptamine. The halogenated tryptamine may further be acted upon by other tryptamine biosynthetic pathway enzymes as disclosed herein (as they would act upon tryptamine) to produce downstream halogenated substituted tryptamines (e.g. a halogenated N-methyltryptamine, a halogenated N,N-dimethyltryptamine, a halogenated N,N,N-trimethyltryptamine, a dihalogenated N-methyltryptamine, a dihalogenated N,N-dimethyltryptamine, a dihalogenated N,N,N-trimethyltryptamine, a trihalogenated N-methyltryptamine, a trihalogenated N,N-dimethyltryptamine or a trihalogenated N,N,N-trimethyltryptamine).

[0100] In some embodiments, a microorganism provided herein comprising at least one nucleic acid molecule that encodes at least one substituted tryptamine biosynthetic pathway enzyme may further comprise at least one nucleic acid molecule that encodes an endogenous or an exogenous tryptophan synthase as described herein, optionally the beta subunit of said tryptophan synthase. In some embodiments, a microorganism provided herein comprising at least one nucleic acid molecule that encodes at least one substituted tryptamine biosynthetic pathway enzyme may be cultured in altered culture conditions as described herein to overexpress an endogenous tryptophan synthase.

[0101] Particular embodiments of the disclosure include, without limitation, the following:
[0102] 1. A microorganism comprising an overexpressed tryptophan synthase.
[0103] 2. The microorganism of embodiment 1, wherein the tryptophan synthase is endogenous and expression of the tryptophan synthase is increased by altering culture conditions.
[0104] 3. The microorganism of embodiment 2, wherein the altered culture conditions comprise nutrient limitation (e.g. phosphate deprivation, nitrogen deprivation, iron deprivation) and/or light deprivation (e.g. withdrawal of light sources, switching of light source spectra).
[0105] 4. The microorganism of any one of embodiments 1 to 3, comprising an exogenous nucleic acid molecule that encodes the endogenous tryptophan synthase.
[0106] 5. The microorganism of embodiment 4, wherein the endogenous tryptophan synthase encoded by the exogenous nucleic acid molecule comprises an amino acid sequence with at least 80%, at least 85%, at least 90%, at least 95%, at least 99%, or 100% sequence identity to the wild-type endogenous tryptophan synthase.
[0107] 6. The microorganism of any one of embodiments 1 to 3, comprising an exogenous nucleic acid molecule that encodes an exogenous tryptophan synthase.
[0108] 7. The microorganism of embodiment 6, wherein the exogenous tryptophan synthase comprises an amino acid sequence with at least 80%, at least 85%, at least 90%, at least 95%, at least 99%, or 100% sequence identity to the sequence as shown in any of SEQ ID NOs: 19-22.
[0109] 8. The microorganism of any one of embodiments 1 to 7, comprising at least one nucleic acid molecule that encodes at least one substituted tryptamine biosynthetic pathway enzyme.
[0110] 9. The microorganism of embodiment 8, wherein the at least one substituted tryptamine biosynthetic pathway enzyme comprises one or more of a tryptophan decarboxylase, a tryptamine 4-monooxygenase, a 4-hydroxytryptamine kinase, an N-methyltransferase, an indole-ethylamine methyltransferase, a tryptamine 5-hydroxylase, and a dimethylallyl tryptamine synthase.
[0111] 10. The microorganism of embodiment 9, wherein the tryptophan decarboxylase comprises an amino acid sequence with at least 80%, at least 85%, at least 90%, at least 95%, at least 99%, or 100% sequence identity to the sequence as shown in any of SEQ ID NOs: 1-3 and 23-35.
[0112] 11. The microorganism of embodiment 9, wherein the tryptamine 4-monooxygenase comprises an amino acid sequence with at least 80%, at least 85%, at least 90%, at least 95%, at least 99%, or 100% sequence identity to the sequence as shown in any of SEQ ID NOs: 4-7 and 36-42.
[0113] 12. The microorganism of embodiment 9, wherein the 4-hydroxytryptamine kinase comprises an amino acid sequence with at least 80%, at least 85%, at least 90%, at least 95%, at least 99%, or 100% sequence identity to the sequence as shown in any of SEQ ID NOs: 8-12 and 43-59.
[0114] 13. The microorganism of embodiment 9, wherein the N-methyltransferase comprises an amino acid sequence with at least 80%, at least 85%, at least 90%, at least 95%, at least 99%, or 100% sequence identity to the sequence as shown in any of SEQ ID NOs: 13-14 and 109-321.
[0115] 14. The microorganism of embodiment 9, wherein the indole-ethylamine methyltransferase comprises an amino acid sequence with at least 80%, at least 85%, at least 90%, at least 95%, at least 99%, or 100% sequence identity to the sequence as shown in any of SEQ ID NOs: 16 and 60-98.
[0116] 15. The microorganism of embodiment 9, wherein the tryptamine 5-hydroxylase comprises an amino acid sequence with at least 80%, at least 85%, at least 90%, at least 95%, at least 99%, or 100% sequence identity to the sequence as shown in SEQ ID NO:
[0117] 16. The microorganism of embodiment 9, wherein the dimethylallyl tryptamine synthase comprises an amino acid sequence with at least 80%, at least 85%, at least 90%, at least 95%, at least 99%, or 100% sequence identity to the sequence as shown in SEQ ID NO: 17.
[0118] 17. A microorganism comprising at least one exogenous nucleic acid molecule that encodes at least one substituted tryptamine biosynthetic pathway enzyme.
[0119] 18. The microorganism of embodiment 17, wherein the at least one substituted tryptamine biosynthetic pathway enzyme comprises a tryptophan decarboxylase, a tryptamine 4-monooxygenase, a 4-hydroxytryptamine kinase, and an N-methyltransferase.
[0120] 19. The microorganism of embodiment 18, wherein the tryptophan decarboxylase comprises an amino acid sequence with at least 80%, at least 85%, at least 90%, at least 95%, at least 99%, or 100% sequence identity to the sequence as shown in any of SEQ ID NOs: 1-3 and 23-35.
[0121] 20. The microorganism of embodiment 17, wherein the at least one substituted tryptamine biosynthetic pathway enzyme comprises a tryptamine 4-monooxygenase, a 4-hydroxytryptamine kinase, and an N-methyltransferase.
[0122] 21. The microorganism of embodiment 20, wherein the at least one substituted tryptamine biosynthetic pathway enzyme does not comprise a tryptophan decarboxylase.
[0123] 22. The microorganism of embodiment 20 or 21, wherein the microorganism does not comprise an exogenous nucleic acid molecule that encodes a tryptophan decarboxylase.
[0124] 23. The microorganism of any one of embodiments 18 to 22, wherein the tryptamine 4-monooxygenase comprises an amino acid sequence with at least 80%, at least 85%, at least 90%, at least 95%, at least 99%, or 100% sequence identity to the sequence as shown in any of SEQ ID NOs: 4-7 and 36-42.
[0125] 24. The microorganism of any one of embodiments 18 to 23, wherein the 4-hydroxytryptamine kinase comprises an amino acid sequence with at least 80%, at leas85%, at least 90%, at least 95%, at least 99%, or 100% sequence identity to the sequence as shown in any of SEQ ID NOs: 8-12 and 43-59.
[0126] 25. The microorganism of any one of embodiments 18 to 24, wherein the N-methyltransferase comprises an amino acid sequence with at least 80%, at least 85%, at least 90%, at least 95%, at least 99%, or 100% sequence identity to the sequence as shown in any of SEQ ID NOs: 13-14 and 109-321.
[0127] 26. The microorganism of any one of embodiments 18 to 25, wherein the microorganism comprises at least one exogenous nucleic acid molecule that encodes a tryptamine 5-hydroxylase.
[0128] 27. The microorganism of embodiment 26, wherein the tryptamine 5-hydroxylase comprises an amino acid sequence with at least 80%, at least 85%, at least 90%, at least 95%, at least 99%, or 100% sequence identity to the sequence as shown in SEQ ID NO:
[0129] 28. The microorganism of any one of embodiments 18 to 27, wherein the microorganism comprises at least one exogenous nucleic acid molecule that encodes an indole-ethylamine methyltransferase.
[0130] 29. The microorganism of embodiment 28, wherein the indole-ethylamine methyltransferase comprises an amino acid sequence with at least 80%, at least 85%, at least 90%, at least 95%, at least 99%, or 100% sequence identity to the sequence as shown in any of SEQ ID NOs: 16 and 60-98.
[0131] 30. The microorganism of embodiment 17, wherein the at least one substituted tryptamine biosynthetic pathway enzyme comprises a tryptophan decarboxylase and a tryptamine 5-hydroxylase.
[0132] 31. The microorganism of embodiment 30, wherein the tryptophan decarboxylase comprises an amino acid sequence with at least 80%, at least 85%, at least 90%, at least 95%, at least 99%, or 100% sequence identity to the sequence as shown in any of SEQ ID NOs: 1-3 and 23-35.
[0133] 32. The microorganism of embodiment 17, wherein the at least one substituted tryptamine biosynthetic pathway enzyme comprises a tryptamine 5-hydroxylase.
[0134] 33. The microorganism of embodiment 32, wherein the at least one substituted tryptamine biosynthetic pathway enzyme does not comprise a tryptophan decarboxylase.
[0135] 34. The microorganism of embodiment 32 or 33, wherein the microorganism does not comprise an exogenous nucleic acid molecule that encodes a tryptophan decarboxylase.
[0136] 35. The microorganism of any one of embodiments 30 to 34, wherein the tryptamine 5-hydroxylase comprises an amino acid sequence with at least 80%, at least 85%, at least 90%, at least 95%, at least 99%, or 100% sequence identity to the sequence as shown in SEQ ID NO: 15.
[0137] 36. The microorganism of embodiment 17, wherein the at least one substituted tryptamine biosynthetic pathway enzyme comprises a tryptophan decarboxylase and an indole-ethylamine methyltransferase.
[0138] 37. The microorganism of embodiment 36, wherein the tryptophan decarboxylase comprises an amino acid sequence with at least 80%, at least 85%, at least 90%, at least 95%, at least 99%, or 100% sequence identity to the sequence as shown in any of SEQ ID NOs: 1-3 and 23-35.
[0139] 38. The microorganism of embodiment 17, wherein the at least one substituted tryptamine biosynthetic pathway enzyme comprises an indole-ethylamine methyltransferase.
[0140] 39. The microorganism of embodiment 38, wherein the at least one substituted tryptamine biosynthetic pathway enzyme does not comprise a tryptophan decarboxylase.
[0141] 40. The microorganism of embodiment 38 or 39, wherein the microorganism does not comprise an exogenous nucleic acid molecule that encodes a tryptophan decarboxylase.
[0142] 41. The microorganism of any one of embodiments 36 to 40, wherein the indole-ethylamine methyltransferase comprises an amino acid sequence with at least 80%, at least 85%, at least 90%, at least 95%, at least 99%, or 100% sequence identity to the sequence as shown in any of SEQ ID NOs: 16 and 60-98.
[0143] 42. A microorganism comprising at least one exogenous nucleic acid molecule that encodes at least one substituted tryptamine biosynthetic pathway enzyme, wherein the at least one substituted tryptamine biosynthetic pathway enzyme comprises a tryptophan decarboxylase, an indole-ethylamine methyltransferase, a tryptamine 4-monooxygenase, and a 4-hydroxytryptamine kinase.
[0144] 43. The microorganism of embodiment 42, wherein the tryptophan decarboxylase comprises an amino acid sequence with at least 80%, at least 85%, at least 90%, at least 95%, at least 99%, or 100% sequence identity to the sequence as shown in any of SEQ ID NOs: 1-3 and 23-35.
[0145] 44. A microorganism comprising at least one exogenous nucleic acid molecule that encodes at least one substituted tryptamine biosynthetic pathway enzyme, wherein the at least one substituted tryptamine biosynthetic pathway enzyme comprises an indole-ethylamine methyltransferase, a tryptamine 4-monooxygenase, and a 4-hydroxytryptamine kinase.
[0146] 45. The microorganism of embodiment 44, wherein the at least one substituted tryptamine biosynthetic pathway enzyme does not comprise a tryptophan decarboxylase.
[0147] 46. The microorganism of embodiment 44 or 45, wherein the microorganism does not comprise an exogenous nucleic acid molecule that encodes a tryptophan decarboxylase.
[0148] 47. The microorganism of any one of embodiments 42 to 46, wherein the indole-ethylamine methyltransferase comprises an amino acid sequence with at least 80%, at least 85%, at least 90%, at least 95%, at least 99%, or 100% sequence identity to the sequence as shown in any of SEQ ID NOs: 16 and 60-98.
[0149] 48. The microorganism of any one of embodiments 42 to 47, wherein the tryptamine 4-monooxygenase comprises an amino acid sequence with at least 80%, at least 85%, at least 90%, at least 95%, at least 99%, or 100% sequence identity to the sequence as shown in any of SEQ ID NOs: 4-7 and 36-42.
[0150] 49. The microorganism of any one of embodiments 42 to 48, wherein the 4-hydroxytryptamine kinase comprises an amino acid sequence with at least 80%, at least 85%, at least 90%, at least 95%, at least 99%, or 100% sequence identity to the sequence as shown in any of SEQ ID NOs: 8-12 and 43-59.
[0151] 50. A microorganism comprising at least one exogenous nucleic acid molecule that encodes at least one substituted tryptamine biosynthetic pathway enzyme, wherein the at least one substituted tryptamine biosynthetic pathway enzyme comprises a dimethylallyl tryptamine synthase.
[0152] 51. The microorganism of embodiment 50, wherein the dimethylallyl tryptamine synthase comprises an amino acid sequence with at least 80%, at least 85%, at least 90%, at least 95%, at least 99%, or 100% sequence identity to the sequence as shown in SEQ ID NO: 17.
[0153] 52. The microorganism of embodiment 50 or 51, wherein the at least one substituted tryptamine biosynthetic pathway enzyme further comprises an aurantioclavine synthase.
[0154] 53. The microorganism of embodiment 52, wherein the aurantioclavine synthase comprises an amino acid sequence with at least 80%, at least 85%, at least 90%, at least 95%, at least 99%, or 100% sequence identity to the sequence as shown in SEQ ID NO: 18.
[0155] 54. A microorganism comprising at least one exogenous nucleic acid molecule that encodes at least one substituted tryptamine biosynthetic pathway enzyme, wherein the at least one substituted tryptamine biosynthetic pathway enzyme comprises a tryptophan decarboxylase, a tryptamine 5-hydroxylase, and an indole-ethylamine methyltransferase.

[0156] The microorganism of embodiment 54, wherein the tryptophan decarboxylase comprises an amino acid sequence with at least 80%, at least 85%, at least 90%, at least 95%, at least 99%, or 100% sequence identity to the sequence as shown in any of SEQ ID NOs: 1-3 and 23-35.
[0157] 56. A microorganism comprising at least one exogenous nucleic acid molecule that encodes at least one substituted tryptamine biosynthetic pathway enzyme, wherein the at least one substituted tryptamine biosynthetic pathway enzyme comprises a tryptamine 5-hydroxylase, and an indole-ethylamine methyltransferase.
[0158] 57. The microorganism of embodiment 56, wherein the at least one substituted tryptamine biosynthetic pathway enzyme does not comprise a tryptophan decarboxylase.
[0159] 58. The microorganism of embodiment 56 or 57, wherein the microorganism does not comprise an exogenous nucleic acid molecule that encodes a tryptophan decarboxylase.
[0160] 59. The microorganism of any one of embodiments 54 to 58, wherein the tryptamine 5-hydroxylase comprises an amino acid sequence with at least 80%, at least 85%, at least 90%, at least 95%, at least 99%, or 100% sequence identity to the sequence as shown in SEQ ID NO: 15.
[0161] 60. The microorganism of any one of embodiments 54 to 59, wherein the indole-ethylamine methyltransferase comprises an amino acid sequence with at least 80%, at least 85%, at least 90%, at least 95%, at least 99%, or 100% sequence identity to the sequence as shown in any of SEQ ID NOs: 16 and 60-98.
[0162] 61. A microorganism comprising at least one exogenous nucleic acid molecule that encodes at least one substituted tryptamine biosynthetic pathway enzyme, wherein the at least one substituted tryptamine biosynthetic pathway enzyme comprises a tryptophan decarboxylase, a tryptamine 4-monooxygenase, a 4-hydroxytryptamine kinase, and either an N-methyltransferase or an indole-ethylamine methyltransferase, wherein the N-methyltransferase or indole-ethylamine methyltransferase is overexpressed and/or present in multiple copies.
[0163] 62. The microorganism of embodiment 61, wherein the tryptophan decarboxylase comprises an amino acid sequence with at least 80%, at least 85%, at least 90%, at least 95%, at least 99%, or 100% sequence identity to the sequence as shown in any of SEQ ID NOs: 1-3 and 23-35.
[0164] 63. A microorganism comprising at least one exogenous nucleic acid molecule that encodes at least one substituted tryptamine biosynthetic pathway enzyme, wherein the at least one substituted tryptamine biosynthetic pathway enzyme comprises a tryptamine 4-monooxygenase, a 4-hydroxytryptamine kinase, and either an N-methyltransferase or an indole-ethylamine methyltransferase, wherein the N-methyltransferase or indole-ethylamine methyltransferase is overexpressed and/or present in multiple copies.
[0165] 64. The microorganism of embodiment 63, wherein the at least one substituted tryptamine biosynthetic pathway enzyme does not comprise a tryptophan decarboxylase
[0166] 65. The microorganism of embodiment 63 or 64, wherein the microorganism does not comprise an exogenous nucleic acid molecule that encodes a tryptophan decarboxylase.
[0167] 66. The microorganism of any one of embodiments 61 to 65, wherein the tryptamine 4-monooxygenase comprises an amino acid sequence with at least 80%, at least 85%, at least 90%, at least 95%, at least 99%, or 100% sequence identity to the sequence as shown in any of SEQ ID NOs: 4-7 and 36-42.
[0168] 67. The microorganism of any one of embodiments 61 to 66, wherein the 4-hydroxytryptamine kinase comprises an amino acid sequence with at least 80%, at least 85%, at least 90%, at least 95%, at least 99%, or 100% sequence identity to the sequence as shown in any of SEQ ID NOs: 8-12 and 43-59.
[0169] 68. The microorganism of any one of embodiments 61 to 67, wherein the N-methyltransferase comprises an amino acid sequence with at least 80%, at least 85%, at least 90%, at least 95%, at least 99%, or 100% sequence identity to the sequence as shown in any of SEQ ID NOs: 13-14 and 109-321.
[0170] 69. The microorganism of any one of embodiments 61 to 67, wherein the indole-ethylamine methyltransferase comprises an amino acid sequence with at least 80%, at least 85%, at least 90%, at least 95%, at least 99%, or 100% sequence identity to the sequence as shown in any of SEQ ID NOs: 16 and 60-98.
[0171] 70. A microorganism comprising at least one exogenous nucleic acid molecule that encodes at least one substituted tryptamine biosynthetic pathway enzyme, wherein the at least one substituted tryptamine biosynthetic pathway enzyme comprises a tryptophan halogenase and a tryptophan decarboxylase.
[0172] 71. The microorganism of embodiment 70, wherein the tryptophan halogenase comprises an amino acid sequence with at least 80%, at least 85%, at least 90%, at least 95%, at least 99%, or 100% sequence identity to the sequence as shown in any of SEQ ID NOs: 99-106.
[0173] 72. The microorganism of embodiment 70 or 71, wherein the tryptophan decarboxylase comprises an amino acid sequence with at least 80%, at least 85%, at least 90%, at least 95%, at least 99%, or 100% sequence identity to the sequence as shown in any of SEQ ID NOs: 1-3 and 23-35.
[0174] 73. The microorganism of any one of embodiments 71 to 72, wherein the at least one substituted biosynthetic pathway enzyme further comprises one or more substituted tryptamine biosynthetic pathway enzymes with at least 80%, at least 85%, at least 90%, at least 95%, at least 99%, or 100% sequence identity to the sequence as shown in any of SEQ ID NOs: 1-18, 23-98, and 107-321.
[0175] 74. The microorganism of any one of embodiments 8 to 69, which is capable of producing at least one substituted tryptamine.
[0176] 75. The microorganism of embodiment 70, wherein the at least one substituted tryptamine comprises one or more of serotonin, N-acetyl serotonin, dimethylallyl tryptamine, lysergic acid diethylamide, N-methyltryptamine, N,N-Dimethyltryptamine, N,N,N-Trimethyltryptamine, N,N,N-Trimethyl-4-phosphoryloxytryptamine (aeruginascin), psilocybin, psilocin, baeocystin, norbaeocystin, 4-hydroxytryptamine, N-acetyl-4-hydroxytrptamine, gramine, clavine, indole-acetic acid , ateviridine, Pindolol, bufotenin, aurantioclavine, and/or a halogenated substituted tryptamine.
[0177] 76. The microorganism of any one of embodiments 17 to 75, wherein the at least one exogenous nucleic acid molecule is comprised in one or more episomal vectors.
[0178] 77. The microorganism of any one of embodiments 17 to 76, further comprising increased expression of tryptophan synthase.
[0179] 78. The microorganism of embodiment 77, wherein the expression of an endogenous tryptophan synthase is increased by altering culture conditions.
[0180] 79. The microorganism of embodiment 78, wherein the altered culture conditions are nutrient limitation (e.g. phosphate deprivation, nitrogen deprivation, iron deprivation) and/or light deprivation (e.g. withdrawal of light sources, switching of light source spectra).
[0181] 80. The microorganism of any one of embodiments 77 to 79, comprising an exogenous nucleic acid molecule that encodes the endogenous tryptophan synthase.
[0182] 81. The microorganism of embodiment 80, wherein the endogenous tryptophan synthase encoded by the exogenous nucleic acid molecule comprises an amino acid sequence with at least 80%, at least 85%, at least 90%, at least 95%, at least 99%, or 100% sequence identity to the wild-type endogenous tryptophan synthase.
[0183] 82. The microorganism of any one of embodiments 77 to 79, comprising an exogenous nucleic acid molecule that encodes an exogenous tryptophan synthase.
[0184] 83. The microorganism of embodiment 82, wherein the exogenous tryptophan synthase comprises an amino acid sequence with at least 80%, at least 85%, at least 90%, at least 95%, at least 99%, or 100% sequence identity to the sequence as shown in any of SEQ ID NOs: 19-22.
[0185] 84. The microorganism of any one of embodiments 1 to 83, wherein the microorganism is a microalga, a stramenopile, or a cyanobacteria.
[0186] 85. The microorganism of embodiment 84, wherein the microalga is a Chlorophyceae, Trebouxiophyxeae, Coscinodiscophyceae, Bacillariphyceae, Eustigmatophyceae, or Labyrinthylomycetes.
[0187] 86. The microorganism of embodiment 84, wherein the microalga is a Chlamydomonales, Chlorellales, Thalassiosirales, Baccilariales, Eustigmatales, or Labyrinthulales.
[0188] 87. The microorganism of embodiment 84, wherein the microalga is a Chlamydomonas, Chlorella, Tetraselmis, Nannochloropsis, Phaeodactylum, Thalassiosira, Prototheca, Scenedesmus, Acutodesmus, Schizochytrium, Dunaliella, Aurantiochytrium, Thraustochytrium, Ulkenia, or Haematococus.
[0189] 88. The microorganism of embodiment 84, wherein the microalgae is Chlamydomonas reinhardtii, Chlorella vulgaris, Chlorella sorokiniana, Chlorella protothecoides, Tetraselmis chuff, Nannochloropsis oculata, Phaeodactylum tricornutum, Thalassiosira pseudonana, Prototheca moriformis, Scenedesmus obliquus, Acutodesmus dimorphus, Schizochytrium limacinum, Dunaliella tertiolecta, Aurantiochytrium sp., Thraustochytrium sp., Ulkenia sp., or Heamatococus plucialis.
[0190] 89. The microorganism of embodiment 84, wherein the microalga is Chlamydomonas reinhardtii.
[0191] 90. The microorganism of embodiment 84, wherein the microalga is Phaeodactylum tricomutum.
[0192] 91. The microorganism of embodiment 84, wherein the microalga is Schizochytrium limacinum.
[0193] 92. The microorganism of embodiment 84, wherein the stramenopile is a Coscinodiscophyceae, Bacillariphyceae, Eustigmatophyceae, or Labyrinthylomycetes.
[0194] 93. The microorganism of embodiment 84, wherein the stramenopile is a Thalassiosirales, Baccilariales, Eustigmatales, or Labyrinthulales.
[0195] 94. The microorganism of embodiment 84, wherein the stramenopile is a Thalassiosira, Phaeodactylum, Nannochloropsis, Schizochytrium Aurantiochytrium, Thraustochytrium, or Ulkenia.
[0196] 95. The microorganism of embodiment 84, wherein the stramenopile is Nannochloropsis oculata, Phaeodactylum tricomutum, Thalassiosira pseudonana, Schizochytrium limacinum, Aurantiochytrium sp., Thraustochytrium sp., or Ulkenia sp.
[0197] 96. The microorganism of embodiment 84, wherein the stramenopile is Phaeodactylum tricomutum.
[0198] 97. The microorganism of embodiment 84, wherein the stramenopile is Schizochytrium limacinum.
[0199] 98. The microorganism of embodiment 84, wherein the microalgae is a diatom.
[0200] 99. A substituted tryptamine biosynthetic pathway enzyme comprising an amino acid sequence with at least 80%, at least 85%, at least 90%, at least 95%, at least 99%, or 100% identity to the sequence as shown in any of SEQ ID NOs: 1-18 and 23-321.
[0201] 100. A tryptophan synthase comprising an amino acid sequence with at least 80%, at least 85%, at least 90%, at least 95%, at least 99%, or 100% identity to the sequence as shown in any of SEQ ID NOs: 19-22.
[0202] 101. A nucleic acid molecule encoding the enzyme of embodiment 99 or 100.
[0203] 102. A vector comprising the nucleic acid molecule of embodiment 101.
[0204] 103. A cell comprising the nucleic acid molecule of embodiment 101 or the vector of embodiment 102.
[0205] 104. A cell culture comprising (i) the microorganism of any one of embodiments 17 to 98 and (ii) a culture media optionally supplemented with a high concentration of tryptamine.
[0206] 105. A cell culture comprising (i) a microalga or a stramenopile comprising at least one exogenous nucleic acid molecule that encodes at least one substituted tryptamine biosynthetic pathway enzyme and (ii) a culture media supplemented with a high concentration of tryptamine.
[0207] 106. The cell culture of embodiment 105, wherein the microalga is a Chlorophyceae, Trebouxiophyxeae, Coscinodiscophyceae, Bacillariphyceae, Eustigmatophyceae, or Labyrinthylomycetes.
[0208] 107. The cell culture of embodiment 105, wherein the microalga is a Chlamydomonales, Chlorellales, Thalassiosirales, Baccilariales, Eustigmatales, or Labyrinthulales.
[0209] 108. The cell culture of embodiment 105, wherein the microalga is a Chlamydomonas, Chlorella, Tetraselmis, Nannochloropsis, Phaeodactylum, Thalassiosira, Prototheca, Scenedesmus, Acutodesmus, Schizochytrium, Dunaliella, Aurantiochytrium, Thraustochytrium, Ulkenia, or Haematococus.
[0210] 109. The cell culture of embodiment 105, wherein the microalga is Chlamydomonas reinhardtii, Chlorella vulgaris, Chlorella sorokiniana, Chlorella protothecoides, Tetraselmis chuff, Nannochloropsis oculata, Phaeodactylum tricornutum, Thalassiosira pseudonana, Prototheca moriformis, Scenedesmus obliquus, Acutodesmus dimorphus, Schizochytrium limacinum, Dunaliella tertiolecta, Aurantiochytrium sp., Thraustochytrium sp., Ulkenia sp., or Heamatococus plucialis.
[0211] 110. The cell culture of embodiment 105, wherein the microalga is Chlamydomonas reinhardtii.
[0212] 111. The cell culture of embodiment 105, wherein the microalga is Phaeodactylum tricornutum.
[0213] 112. The cell culture of embodiment 105, wherein the microalga is Schizochytrium limacinum.
[0214] 113. The cell culture of embodiment 105, wherein the stramenopile is a Coscinodiscophyceae, Bacillariphyceae, Eustigmatophyceae, or Labyrinthylomycetes.
[0215] 114. The cell culture of embodiment 105, wherein the stramenopile is a Thalassiosirales, Baccilariales, Eustigmatales, or Labyrinthulales.
[0216] 115. The cell culture of embodiment 105, wherein the stramenopile is a Thalassiosira, Phaeodactylum, Nannochloropsis, Schizochytrium Aurantiochytrium, Thraustochytrium, or Ulkenia.
[0217] 116. The cell culture of embodiment 105, wherein the stramenopile is Nannochloropsis oculata, Phaeodactylum tricornutum, Thalassiosira pseudonana, Schizochytrium limacinum, Aurantiochytrium sp., Thraustochytrium sp., or Ulkenia sp.
[0218] 117. The cell culture of embodiment 105, wherein the stramenopile is Phaeodactylum tricornutum.
[0219] 118. The cell culture of embodiment 105, wherein the stramenopile is Schizochytrium limacinum.
[0220] 119. The cell culture of any one of embodiments 104 to 118, wherein the high concentration of tryptamine is at least about 1 mM, 2 mM, 3 mM, 4 mM, 5 mM, 6 mM, 7mM, 9 mM, or 10 mM.
[0221] 120. The cell culture of any one of embodiments 104 to 119, wherein the at least one substituted tryptamine biosynthetic pathway enzyme comprises a tryptamine 4-monooxygenase, a 4-hydroxytryptamine kinase, and an N-methyltransferase.
[0222] 121. The cell culture of embodiment 120, wherein the tryptamine 4-monooxygenase comprises an amino acid sequence with at least 80%, at least 85%, at least 90%, at least 95%, at least 99%, or 100% sequence identity to the sequence as shown in any of SEQ ID NOs: 4-7 and 36-42.
[0223] 122. The cell culture of embodiment 120 or 121, wherein the 4-hydroxytryptamine kinase comprises an amino acid sequence with at least 80%, at least 85%, at least 90%, at least 95%, at least 99%, or 100% sequence identity to the sequence as shown in any of SEQ ID NOs: 8-12 and 43-59.
[0224] 123. The cell culture of any one of embodiments 120 to 122, wherein the N-methyltransferase comprises an amino acid sequence with at least 80%, at least 85%, at least 90%, at least 95%, at least 99%, or 100% sequence identity to the sequence as shown in any of SEQ ID NOs: 13-14 and 109-321.
[0225] 124. The cell culture of any one of embodiments 104 to 119, wherein the at least one substituted tryptamine biosynthetic pathway enzyme comprises a tryptamine 5-hydroxylase.
[0226] 125. The cell culture of embodiment 124, wherein the tryptamine 5-hydroxylase comprises an amino acid sequence with at least 80%, at least 85%, at least 90%, at least 95%, at least 99%, or 100% sequence identity to the sequence as shown in SEQ ID NO:
[0227] 126. The cell culture of any one of embodiments 104 to 119, wherein the at least one substituted tryptamine biosynthetic pathway enzyme comprises an indole-ethylamine methyltransferase.
[0228] 127. The cell culture of embodiment 126, wherein the indole-ethylamine methyltransferase comprises an amino acid sequence with at least 80%, at least 85%, at least 90%, at least 95%, at least 99%, or 100% sequence identity to the sequence as shown in any of SEQ ID NOs: 16 and 60-98.
[0229] 128. The cell culture of any one of embodiments 104 to 119, wherein the at least one substituted tryptamine biosynthetic pathway enzyme comprises an indole-ethylamine methyltransferase, a tryptamine 4-monooxygenase, and a 4-hydroxytryptamine kinase.
[0230] 129. The cell culture of embodiment 128, wherein the indole-ethylamine methyltransferase comprises an amino acid sequence with at least 80%, at least 85%, at least 90%, at least 95%, at least 99%, or 100% sequence identity to the sequence as shown in any of SEQ ID NOs: 16 and 60-98.
[0231] 130. The cell culture of embodiment 128 or 129, wherein the tryptamine 4-monooxygenase comprises an amino acid sequence with at least 80%, at least 85%, at least 90%, at least 95%, at least 99%, or 100% sequence identity to the sequence as shown in any of SEQ ID NOs: 4-7 and 36-42.
[0232] 131. The cell culture of any one of embodiments 128 to 130, wherein the 4-hydroxytryptamine kinase comprises an amino acid sequence with at least 80%, at least 85%, at least 90%, at least 95%, at least 99%, or 100% sequence identity to the sequence as shown in any of SEQ ID NOs: 8-12 and 43-59.
[0233] 132. The cell culture of any one of embodiments 104 to 119, wherein the at least one substituted tryptamine biosynthetic pathway enzyme comprises a dimethylallyl tryptamine synthase and an aurantioclavine synthase.
[0234] 133. The cell culture of embodiment 132, wherein the dimethylallyl tryptamine synthase comprises an amino acid sequence with at least 80%, at least 85%, at least 90%, at least 95%, at least 99%, or 100% sequence identity to the sequence as shown in SEQ ID NO: 17.
[0235] 134. The cell culture of embodiment 132 or 133, wherein the aurantioclavine synthase comprises an amino acid sequence with at least 80%, at least 85%, at least 90%, at least 95%, at least 99%, or 100% sequence identity to the sequence as shown in SEQ ID NO: 18.
[0236] 135. The cell culture of any one of embodiments 104 to 119, wherein the at least one substituted tryptamine biosynthetic pathway enzyme comprises a tryptamine 5-hydroxylase, and an indole-ethylamine methyltransferase.
[0237] 136. The cell culture of embodiment 135, wherein the tryptamine 5-hydroxylase comprises an amino acid sequence with at least 80%, at least 85%, at least 90%, at least 95%, at least 99%, or 100% sequence identity to the sequence as shown in SEQ ID NO:
[0238] 137. The cell culture of embodiment 135 or 136, wherein the indole-ethylamine methyltransferase comprises an amino acid sequence with at least 80%, at least 85%, at least 90%, at least 95%, at least 99%, or 100% sequence identity to the sequence as shown in any of SEQ ID NOs: 16 and 60-98.
[0239] 138. The cell culture of any one of embodiments 104 to 119, wherein the at least one substituted tryptamine biosynthetic pathway enzyme comprises a tryptamine 4-monooxygenase, a 4-hydroxytryptamine kinase, and either an N-methyltransferase or an indole-ethylamine methyltransferase, wherein the N-methyltransferase or indole-ethylamine methyltransferase is overexpressed and/or present in multiple copies.
[0240] 139. The cell culture of embodiment 138, wherein the tryptamine 4-monooxygenase comprises an amino acid sequence with at least 80%, at least 85%, at least 90%, at least 95%, at least 99%, or 100% sequence identity to the sequence as shown in any of SEQ ID NOs: 4-7 and 36-42.
[0241] 140. The cell culture of embodiment 138 or 139 wherein the 4-hydroxytryptamine kinase comprises an amino acid sequence with at least 80%, at least 85%, at least 90%, at least 95%, at least 99%, or 100% sequence identity to the sequence as shown in any of SEQ ID NOs: 8-12 and 43-59.
[0242] 141. The cell culture of any one of embodiments 138 to 140, wherein the N-methyltransferase comprises an amino acid sequence with at least 80%, at least 85%, at least 90%, at least 95%, at least 99%, or 100% sequence identity to the sequence as shown in any of SEQ ID NOs: 13-14 and 109-321.
[0243] 142. The cell culture of any one of embodiments 138 to 140, wherein the indole-ethylamine methyltransferase comprises an amino acid sequence with at least 80%, at least 85%, at least 90%, at least 95%, at least 99%, or 100% sequence identity to the sequence as shown in any of SEQ ID NOs: 16 and 60-98.
[0244] 143. The cell culture of any one of embodiments 105 to 142, wherein the at least one substituted tryptamine biosynthetic pathway enzyme does not comprise a tryptophan decarboxylase.
[0245] 144. The cell culture of any one of embodiments 105 to 143, wherein the microorganism does not comprise an exogenous nucleic acid molecule that encodes a tryptophan decarboxylase.
[0246] 145. The cell culture of any one of embodiments 105 to 144, wherein the microalga or a stramenopile produces at least one substituted tryptamine.
[0247] 146. The cell culture of embodiment 145, wherein the at least one substituted tryptamine comprises one or more of serotonin, N-acetyl serotonin, dimethylallyl tryptamine, lysergic acid diethylamide, N-methyltryptamine, N,N-Dimethyltryptamine, N,N,N-Trimethyltryptamine, N,N,N-Trimethyl-4-phosphoryloxytryptamine (aeruginascin), psilocybin, psilocin, baeocystin, norbaeocystin, 4-hydroxytryptamine, N-acetyl-4-hydroxytrptamine, gramine, clavine, indole-acetic acid , ateviridine, Pindolol, bufotenin, and/or aurantioclavine.
[0248] 147. The cell culture of any one of embodiments 105 to 146, wherein the cell culture undergoes autotrophic growth.
[0249] 148. The cell culture of embodiment 147, wherein the autotrophic growth is photosynthetic growth.
[0250] 149. The cell culture of embodiment 148, wherein the photosynthetic growth occurs in the presence of a solar light source.
[0251] 150. The cell culture of embodiment 148, wherein the photosynthetic growth occurs in the presence of an artificial light source.
[0252] 151. The cell culture of any one of embodiments 105 to 150, wherein the cell culture undergoes growth in organic conditions.
[0253] 152. A method for producing at least one substituted tryptamine in a microalga or a stramenopile, comprising culturing the microalga or stramenopile in a culture media supplemented with a high concentration of tryptamine, wherein the microalga or stramenopile comprises at least one exogenous nucleic acid molecule that encodes at least one substituted tryptamine biosynthetic pathway enzyme.
[0254] 153. The method of embodiment 152, wherein the microalga is a Chlorophyceae, Trebouxiophyxeae, Coscinodiscophyceae, Bacillariphyceae, Eustigmatophyceae, or Labyrinthylomycetes.
[0255] 154. The method embodiment 152, wherein the microalga is a Chlamydomonales, Chlorellales, Thalassiosirales, Baccilariales, Eustigmatales, or Labyrinthulales.
[0256] 155. The method of embodiment 152, wherein the microalga is a Chlamydomonas, Chlorella, Tetraselmis, Nannochloropsis, Phaeodactylum, Thalassiosira, Prototheca, Scenedesmus, Acutodesmus, Schizochytrium, Dunaliella, Aurantiochytrium, Thraustochytrium, Ulkenia, or Haematococus.
[0257] 156. The method of embodiment 152, wherein the microalga is Chlamydomonas reinhardtii, Chlorella vulgaris, Chlorella sorokiniana, Chlorella protothecoides, Tetraselmis chuff, Nannochloropsis oculata, Phaeodactylum tricornutum, Thalassiosira pseudonana, Prototheca moriformis, Scenedesmus obliquus, Acutodesmus dimorphus, Schizochytrium limacinum, Dunaliella tertiolecta, Aurantiochytrium sp., Thraustochytrium sp., Ulkenia sp., or Heamatococus plucialis.
[0258] 157. The method of embodiment 152, wherein the microalga is Chlamydomonas reinhardtii.
[0259] 158. The method of embodiment 152, wherein the microalga is Phaeodactylum tricomutum.
[0260] 159. The method of embodiment 152, wherein the microalga is Schizochytrium limacinum.
[0261] 160. The method of embodiment 152, wherein the stramenopile is a Coscinodiscophyceae, Bacillariphyceae, Eustigmatophyceae, or Labyrinthylomycetes.
[0262] 161. The method of embodiment 152, wherein the stramenopile is a Thalassiosirales, Baccilariales, Eustigmatales, or Labyrinthulales.
[0263] 162. The method of embodiment 152, wherein the stramenopile is a Thalassiosira, Phaeodactylum, Nannochloropsis, Schizochytrium Aurantiochytrium, Thraustochytrium, or Ulkenia.
[0264] 163. The method of embodiment 152, wherein the stramenopile is Nannochloropsis oculata, Phaeodactylum tricomutum, Thalassiosira pseudonana, Schizochytrium limacinum, Aurantiochytrium sp., Thraustochytrium sp., or Ulkenia sp.
[0265] 164. The method of embodiment 152, wherein the stramenopile is Phaeodactylum tricomutum.
[0266] 165. The method of embodiment 152, wherein the stramenopile is Schizochytrium limacinum.
[0267] 166. The method of any one of embodiments 152 to 165, wherein the high concentration of tryptamine is at least about 1 mM, 2 mM, 3 mM, 4 mM, 5 mM, 6 mM, 7 mM, 9 mM, or 10 mM.
[0268] 167. The method of any one of embodiments 152 to 166, wherein the at least one substituted tryptamine biosynthetic pathway enzyme comprises a tryptamine 4-monooxygenase, a 4-hydroxytryptamine kinase, and an N-methyltransferase.
[0269] 168. The method of embodiment 167, wherein the tryptamine 4-monooxygenase comprises an amino acid sequence with at least 80%, at least 85%, at least 90%, at least 95%, at least 99%, or 100% sequence identity to the sequence as shown in any of SEQ ID NOs: 4-7 and 36-42.
[0270] 169. The method of embodiment 167 or 168, wherein the 4-hydroxytryptamine kinase comprises an amino acid sequence with at least 80%, at least 85%, at least 90%, at least 95%, at least 99%, or 100% sequence identity to the sequence as shown in any of SEQ ID NOs: 8-12 and 43-59.
[0271] 170. The method of any one of embodiments 167 to 169, wherein the N-methyltransferase comprises an amino acid sequence with at least 80%, at least 85%, at least 90%, at least 95%, at least 99%, or 100% sequence identity to the sequence as shown in any of SEQ ID NOs: 13-14 and 109-321.
[0272] 171. The method of any one of embodiments 152 to 166, wherein the at least one substituted tryptamine biosynthetic pathway enzyme comprises a tryptamine 5-hydroxylase.
[0273] 172. The method of embodiment 171, wherein the tryptamine 5-hydroxylase comprises an amino acid sequence with at least 80%, at least 85%, at least 90%, at least 95%, at least 99%, or 100% sequence identity to the sequence as shown in SEQ ID NO: 15.
[0274] 173. The method of any one of embodiments 152 to 166, wherein the at least one substituted tryptamine biosynthetic pathway enzyme comprises an indole-ethylamine methyltransferase.
[0275] 174. The method of embodiment 173, wherein the indole-ethylamine methyltransferase comprises an amino acid sequence with at least 80%, at least 85%, at least 90%, at least 95%, at least 99%, or 100% sequence identity to the sequence as shown in any of SEQ ID NOs: 16 and 60-98.
[0276] 175. The method of any one of embodiments 152 to 166, wherein the at least one substituted tryptamine biosynthetic pathway enzyme comprises an indole-ethylamine methyltransferase, a tryptamine 4-monooxygenase, and a 4-hydroxytryptamine kinase.
[0277] 176. The method of embodiment 175, wherein the indole-ethylamine methyltransferase comprises an amino acid sequence with at least 80%, at least 85%, at least 90%, at least 95%, at least 99%, or 100% sequence identity to the sequence as shown in any of SEQ ID NOs: 16 and 60-98.
[0278] 177. The method of embodiment 175 or 176, wherein the tryptamine 4-monooxygenase comprises an amino acid sequence with at least 80%, at least 85%, at least 90%, at least 95%, at least 99%, or 100% sequence identity to the sequence as shown in any of SEQ ID NOs: 4-7 and 36-42.
[0279] 178. The method of any one of embodiments 175 to 177, wherein the 4-hydroxytryptamine kinase comprises an amino acid sequence with at least 80%, at least 85%, at least 90%, at least 95%, at least 99%, or 100% sequence identity to the sequence as shown in any of SEQ ID NOs: 8-12 and 43-59.
[0280] 179. The method of any one of embodiments 152 to 166, wherein the at least one substituted tryptamine biosynthetic pathway enzyme comprises a dimethylallyl tryptamine synthase and an aurantioclavine synthase.
[0281] 180. The method of embodiment 179, wherein the dimethylallyl tryptamine synthase comprises an amino acid sequence with at least 80%, at least 85%, at least 90%, at least 95%, at least 99%, or 100% sequence identity to the sequence as shown in SEQ ID NO: 17.
[0282] 181. The method of embodiment 179 or 180, wherein the aurantioclavine synthase comprises an amino acid sequence with at least 80%, at least 85%, at least 90%, at least 95%, at least 99%, or 100% sequence identity to the sequence as shown in SEQ ID NO: 18.
[0283] 182. The method of any one of embodiments 152 to 166, wherein the at least one substituted tryptamine biosynthetic pathway enzyme comprises a tryptamine 5-hydroxylase, and an indole-ethylamine methyltransferase.
[0284] 183. The method of embodiment 182, wherein the tryptamine 5-hydroxylase comprises an amino acid sequence with at least 80%, at least 85%, at least 90%, at least 95%, at least 99%, or 100% sequence identity to the sequence as shown in SEQ ID NO: 15.
[0285] 184. The method of embodiment 182 or 183, wherein the indole-ethylamine methyltransferase comprises an amino acid sequence with at least 80%, at least 85%, at least 90%, at least 95%, at least 99%, or 100% sequence identity to the sequence as shown in any of SEQ ID NOs: 16 and 60-98.
[0286] 185. The method of any one of embodiments 152 to 166, wherein the at least one substituted tryptamine biosynthetic pathway enzyme comprises a tryptamine 4-monooxygenase, a 4-hydroxytryptamine kinase, and either an N-methyltransferase or an indole-ethylamine methyltransferase, wherein the N-methyltransferase or indole-ethylamine methyltransferase is overexpressed and/or present in multiple copies.
[0287] 186. The method of embodiment 185, wherein the tryptamine 4-monooxygenase comprises an amino acid sequence with at least 80%, at least 85%, at least 90%, at least 95%, at least 99%, or 100% sequence identity to the sequence as shown in any of SEQ ID NOs: 4-7 and 36-42.
[0288] 187. The method of embodiment 185 or 186 wherein the 4-hydroxytryptamine kinase comprises an amino acid sequence with at least 80%, at least 85%, at least 90%, at least 95%, at least 99%, or 100% sequence identity to the sequence as shown in any of SEQ ID NOs: 8-12 and 43-59.
[0289] 188. The method of any one of embodiments 186 to 187, wherein the N-methyltransferase comprises an amino acid sequence with at least 80%, at least 85%, at least 90%, at least 95%, at least 99%, or 100% sequence identity to the sequence as shown in any of SEQ ID NOs: 13-14 and 109-321.
[0290] 189. The method of any one of embodiments 186 to 188, wherein the indole-ethylamine methyltransferase comprises an amino acid sequence with at least 80%, at least 85%, at least 90%, at least 95%, at least 99%, or 100% sequence identity to the sequence as shown in any of SEQ ID NOs: 16 and 60-98.
[0291] 190. The method of any one of embodiments 152 to 189, wherein the at least one substituted tryptamine biosynthetic pathway enzyme does not comprise a tryptophan decarboxylase.
[0292] 191. The method of any one of embodiments 152 to 190, wherein the microorganism does not comprise an exogenous nucleic acid molecule that encodes a tryptophan decarboxylase.
[0293] 192. The method of any one of embodiments 152 to 191, wherein the at least one substituted tryptamine comprises one or more of serotonin, N-acetyl serotonin, dimethylallyl tryptamine, lysergic acid diethylamide, N-methyltryptamine, N,N-Dimethyltryptamine, N,N,N-Trimethyltryptamine, N,N,N-Trimethyl-4-phosphoryloxytryptamine (aeruginascin), psilocybin, psilocin, baeocystin, norbaeocystin, 4-hydroxytryptamine, N-acetyl-4-hydroxytrptamine, gramine, clavine, indole-acetic acid , ateviridine, Pindolol, bufotenin, and/or aurantioclavine.
[0294] 193. The method of any one of embodiments 152 to 192, wherein the microalga or stramenopile undergoes autotrophic growth.
[0295] 194. The method of embodiment 193, wherein the autotrophic growth is photosynthetic growth.

[0296] 195. The method of embodiment 194, wherein the photosynthetic growth occurs in the presence of a solar light source.

[0297] 196. The method of embodiment 194, wherein the photosynthetic growth occurs in the presence of an artificial light source.

[0298] 197. The method of any one of embodiments 152 to 196, further comprising isolating the at least one substituted tryptamine.

### EXAMPLE 1

[0299] Microorganisms were cultured separately in varying concentrations of supplemented tryptamine to test tolerance and growth rate. Log-phase cultures of Phaeodactylum tricornutum Schizochytrium limacinum, Chlamydomonas reihardtii, Saccharomyces cerevisiae, Escherichia coli were each supplemented with 0 mM, 0.1 mM, 0.5 mM, 1 mM, 2 mM, 5 mM, or 10 mM of tryptamine.

[0300] FIG. 7 shows the survival rate of each microorganism over 36 hours following addition of tryptamine at a concentration of 2mM to the culture media, as measured by trypan-blue exclusion. Briefly, 50 μL of cell culture was incubated for 5 min with equal volume of 0.4% trypan blue (SigmaAldrich). At least three independent experiments were performed with more than 500 cells counted per condition. For validation, live-dead assay was also conducted using fluorescent dyes FDA/PI in Biotek Synergy H1 plate reader.

[0301] The cultures of E. coli and S. cerevisiae were dead within 4 hours and 36 hours following supplementation, respectively. By contrast, the cultures of C. reinhardtii, P. tricornutum and S. limacinum tolerated the tryptamine supplementation and maintained viabilities of ˜45%, ˜75% and ˜99%, respectively.

[0302] FIG. 8 shows the survival rate of each microorganism over 36 hours following addition of tryptamine at a concentration of 5 mM to the culture media, as measured by trypan-blue exclusion. The cultures of E. coli and S. cerevisiae were dead within 4 hours following supplementation. By contrast, the cultures of C. reinhardtii, P. tricornutum and S. limacinum tolerated the tryptamine supplementation and maintained viabilities of ˜15%, ˜75% and ˜95%, respectively.

[0303] FIG. 9 shows the relative growth of each microorganism by 16 hours (E. coli and S. cerevisiae) or 36 hours (C. reinhardtii, P. tricornutum, and S. limacinum) after the addition of tryptamine at 0.1 mM, 1 mM, or 10 mM to the culture media. Growth of E. coli and S. cerevisiae were significantly diminished at a tryptamine concentration of 1 mM, whereas C. reinhardtii maintained ˜75% of normal growth. The growth rate of P. tricornutum was not affected until 5 mM and the growth rate of S. limacinum was not affected at any tested concentration.

[0304] These results show that microalgae (e.g. C. reinhardtii and P. tricornutum) and stramenopiles (e.g. P. tricornutum and S. limacinum) tolerate high concentrations of tryptamine that kill or severely restrict growth of yeast and bacteria, and are therefore useful for high-yield biosynthetic production of tryptamine derivatives in tryptamine-supplemented cultures.

The application's sequence listing, which the Patent Office published only in electronic form, follows.

SEQUENCE LISTING (321 sequences)

SEQ ID NO: 1 - protein, 439 aa, Psilocybe cubensis
MQVIPACNSAAIRSLCPTPESFRNMGWLSVSDAVYSEFIGELATRASNRNYSNEFGLMQPIQEFKAFIESDPVVHQEFIDMFEGIQDSPRNYQELCNMFNDIFRKAPVYGDLGPPVYMIMAKLMNTRAGFSAFTRQRLNLHFKKLFDTWGLFLSSKDSRNVLVADQFDDRHCGWLNERALSAMVKHYNGRAFDEVFLCDKNAPYYGFNSYDDFFNRRFRNRDIDRPVVGGVNNTTLISAACESLSYNVSYDVQSLDTLVFKGETYSLKHLLNNDPFTPQFEHGSILQGFLNVTAYHRWHAPVNGTIVKIINVPGTYFAQAPSTIGDPIPDNDYDPPPYLKSLVYFSNIAARQIMFIEADNKEIGLIFLVFIGMTEISTCEATVSEGQHVNRGDDLGMFHFGGSSFALGLRKDCRAEIVEKFTEPGTVIRINEVVAALKA

SEQ ID NO: 2 - protein, 438 aa, Psilocybe cyanescens
MQVLPACQSSALKTLCPSPEAFRKLGWLPTSDEVYNEFIDDLTGRTCNEKYSSQVTLLKPIQDFKTFIENDPIVYQEFISMFEGIEQSPTNYHELCNMFNDIFRKAPLYGDLGPPVYMIMARIMTQAGFSAFTKESLNFHFKKLFDTWGLFLSSKNSRNVLVADQFDDKHYGWFSERAKTAMMINYPGRTFEKVFICDEHVPYHGFTSYDDFFNRRFRDKDTDRPVVGGVTDTTLIGAACESLSYNVSHNVQSLDTLVIKGEAYSLKHLLHNDPFTPQFEHGSIIQGFLNVTAYHRWHSPVNGTIVKIVNVPGTYFAQAPYTIGSPIPDNDRDPPPYLKSLVYFSNIAARQIMFIEADNKDIGLIFLVFIGMTEISTCEATVCEGQHVNRGDDLGMFHFGGSSFALGLRKDSKAKILEKFAKPGTVIRINELVASVRK

SEQ ID NO: 3 - protein, 497 aa, Oryza sativa
MEGVGGGGGGEEWLRPMDAEQLRECGHRMVDFVADYYKSIEAFPVLSQVQPGYLKEVLPDSAPRQPDTLDSLFDDIQQKIIPGVTHWQSPNYFAYYPSNSSTAGFLGEMLSAAFNIVGFSWITSPAATELEVIVLDWFAKMLQLPSQFLSTALGGGVIQGTASEAVLVALLAARDRALKKHGKHSLEKLVVYASDQTHSALQKACQIAGIFSENVRVVIADCNKNYAVAPEAVSEALSIDLSSGLIPFFICATVGTTSSSAVDPLPELGQIAKSNDMWFHIDAAYAGSACICPEYRHHLNGVEEADSFNMNAHKWFLTNFDCSLLWVKDRSFLIQSLSTNPEFLKNKASQANSVVDFKDWQIPLGRRFRSLKLWMVLRLYGVDNLQSYIRKHIHLAEHFEQLLLSDSRFEVVTPRTFSLVCFRLVPPTSDHENGRKLNYDMMDGVNSSGKIFLSHTVLSGKFVLRFAVGAPLTEERHVDAAWKLLRDEATKVLGKMV

SEQ ID NO: 4 - protein, 508 aa, Psilocybe cubensis
MIAVLFSFVIAGCIYYIVSRRVRRSRLPPGPPGIPIPFIGNMFDMPEESPWLTFLQWGRDYNTDILYVDAGGTEMVILNTLETITDLLEKRGSIYSGRLESTMVNELMGWEFDLGFITYGDRWREERRMFAKEFSEKGIKQFRHAQVKAAHQLVQQLTKTPDRWAQHIRHQIAAMSLDIGYGIDLAEDDPWLEATHLANEGLAIASVPGKFWVDSFPSLKYLPAWFPGAVFKRKAKVWREAADHMVDMPYETMRKLAPQGLTRPSYASARLQAMDLNGDLEHQEHVIKNTAAEVNVGGGDTTVSAMSAFILAMVKYPEVQRKVQAELDALTNNGQIPDYDEEDDSLPYLTACIKELFRWNQIAPLAIPHKLMKDDVYRGYLIPKNTLVFANTWAVLNDPEVYPDPSVFRPERYLGPDGKPDNTVRDPRKAAFGYGRRNCPGIHLAQSTVWIAGATLLSAFNIERPVDQNGKPIDIPADFTTGFFRHPVPFQCRFVPRTEQVSQSVSGP

SEQ ID NO: 5 - protein, 507 aa, Psilocybe cyanescens
MIVLLVSLVLAGCIYYANARRVRRSRLPPGPPGIPLPFIGNMFDMPSESPWLRFLQWGRDYHTDILYLNAGGTEIIILNTLDAITDLLEKRGSMYSGRLESTMVNELMGWEFDLGFITYGERWREERRMFAKEFSEKNIRQFRHAQIKAANQLVRQLIKTPDRWSQHIRHQIAAMSLDIGYGIDLAEDDPWIAATQLANEGLAEASVPGSFWVDSFPALKYLPSWLPGAGFKRKAKVWKEGADHMVNMPYETMKKLTVQGLARPSYASARLQAMDPDGDLEHQEHVIRNTATEVNVGGGDTTVSAVSAFILAMVKYPEVQRQVQAELDALTSKGVVPNYDEEDDSLPYLTACVKEIFRWNQIAPLAIPHRLIKDDVYRGYLIPKNALVYANSWAVLNDPEEYPNPSEFRPERYLSSDGKPDPTVRDPRKAAFGYGRRNCPGIHLAQSTVWIAGATLLSVFNIERPVDGNGKPIDIPATFTTGFFRHPEPFQCRFVPRTQEILKSVSG

SEQ ID NO: 6 - protein, 309 aa, Psilocybe cyanescens
MHIRNPYRDGVDYQALAEAFPALKPHVTVNSDNTTSIDFAVPEAQRLYTAALLHRDFGLTITLPEDRLCPTVPNRLNYVLWVEDILKVTSDALGLPDNRQVKGIDIGTGASAIYPMLACSRFKTWSMVATEVDQKCIDTARLNVIANNLQERLAIIATSVDGPILVPLLQANSDFEYDFTMCNPPFYDGASDMQTSDAAKGFGFGVNAPHTGTVLEMATEGGESAFVAQMVRESLNLQTRCRWFTSNLGKLKSLYEIVGLLREHQISNYAINEYVQGATRRYAIAWSFIDVRLPDHLSRPSNPDLSSLF

SEQ ID NO: 7 - protein, 483 aa, Panaeolus cyanescens
MINLPLSLVLVGCVYYIVSRRIRRSRLPPGPPGIPIPFVGNMYDMPSESPWLTFLQWGREYNDRGLTTIFRVESTMVNKLMGWEFDLGFITYGDRWREERRMFSKEFSEKAIKQFRHSQVKAAHRFVQQLAANGEPSRLPHYIRHQIAAMSLDIGYGVDLAQDDPWLEAAHLANEGLATASVPGTFWIDSFPALKYLPSWFPGAGFKRQAKIWKEAADHMVNMPYERMKKLAPQGLARPSYASARLQAMDPNGDLEYQEQVIKNTASQVNVGGGDTTVSAVSAFILAMVIYPEVQRKVQAELDAVLSNGRIPDYDEENDSMPYLTACVKELFRWNQIAPLAIPHKLVKDDIYRGYLIPKNTLVFANSWAVLNDPEVYPDPSVFRPERYLGPDGKPNDTVRDPRKAAFGYGRRNCPGIHLALSTVWITAATLLSVFDIERPVDHKGNPIDIPAAFTKGFFRHPEPFQCRFVPRNEDSLKSLSGL

SEQ ID NO: 8 - protein, 362 aa, Psilocybe cubensis
MAFDLKTEDGLITYLTKHLSLDVDTSGVKRLSGGFVNVTWRIKLNAPYQGHTSIILKHAQPHMSTDEDFKIGVERSVYEYQAIKLMMANREVLGGVDGIVSVPEGLNYDLENNALIMQDVGKMKTLLDYVTAKPPLATDIARLVGTEIGGFVARLHNIGRERRDDPEFKFFSGNIVGRTTSDQLYQTIIPNAAKYGVDDPLLPTVVKDLVDDVMHSEETLVMADLWSGNILLQLEEGNPSKLQKIYILDWELCKYGPASLDLGYFLGDCYLISRFQDEQVGTTMRQAYLQSYARTSKHSINYAKVTAGIAAHIVMWTDFMQWGSEEERINFVKKGVAAFHDARGNNDNGEITSTLLKESSTA

SEQ ID NO: 9 - protein, 362 aa, Psilocybe cyanescens
MAFDLKTPEGLLLYLTRHLSLDVDPSGVKRLSGGFVNVTWRIRLNAPYQGHTSIILKHAQPHLSSDEDFKIGVERSAYEYQALKVMSANQEVLGGDDSRVSVPEGLHYDVENNALIMQDVGTMKTLLDYATAKPPLSTEIASLVGTEIGAFIARLHNLGRKRRDQPAFKFFSGNIVGRTTADQLYQTIIPNAAKYGINDPLLPTVVKDLVGEVMNSEETLIMADLWSGNILLEFVEGNPSELKKIWLVDWELCKYGPASLDMGYFLGDCYLIARFQDELVGTTMRKAYLKGYARTAKGTINYSKVTASIGAHLVMWTDFMKWGNYEEREEFVKKGVEALHDAWEDNNDGEITSVLVNEASST

SEQ ID NO: 10 - protein, 379 aa, Colletotrichum trifolii
MASSLAPDQLLEANRIDIFQCLKNTVYAAASIEPLTGGQANFTYHVRLEQALCQDRDDAASAVTDVLVKRGAPYMAKHPQNGLTTDRCRQWVASNATGFIIRTPKCLFYEAETKTQVHEYIPRVLDLRTYSLKLFRLQTTASLRPQCRELGKALAGYIARFHSLGVIPPEKGAESMGRSDIWSAVTRSDDMQKLKHMINYEWLLDRVDQFPEVLQDAREVFVQVKQRALDELERGSKNLTVIHGDFYPQNILLQAEPLSVGCLTPLYVVDWENAQLGLPAMDHGGMMGEMYVLWLCHGIEAGLWMMQGYAKGMATLPEETKWRVAVQIGVHILSFWTFGREGPVGEFARQGRDIVANAWGKNRAWFETSELSCLFLGTS

SEQ ID NO: 11 - protein, 354 aa, Lachnellula willkommii
AQASSKSLSHGPYACASLTQLSGGTANFVYRGTLIKPLQDGTETIVIKHTEPYVASNPNFKLTSTRCDFEQTILSGLETLSPISHSGITVQIPKIYSFFPETHTQIYADLPSSTQLKTYALTHSLTKAQCSRLGHALGLWAKTFHAWGAAAGQFGLRESMKGNVAMKELKYAINYPRLVATIELFPGILQASKEVFEAVANDVRARLDREEGSLIHGDFWSGNVLLKNAPLPGLEEPLKLFIIDWELSHLSDYAFDLGQMFAELFELKHFKGLDAGVWLIEAFMTGYGKLEEQVAFRTAIHVGAHLICWGSRVQGWGTQEQVEEVAEVGRDFVVKGWKKDRGYFEGTSLRSLFA

SEQ ID NO: 12 - protein, 391 aa, Colletotrichum sidae
MASLAPDELLEANRIDVFQCLKNTVYAAASIEPLAGGQANFTYHVRLEQALCHRDDATTAITDVLVKRGAPYMAKHPQNGLTTDRCDVEVVCMKELESLQEQWVASNATRFIVRTPKCLFYEAETKTQVHEYIPRVLDLRTYSLKLFRLQTTASLRPQCRELGKALAGYIARFHSLGAIPPGNGAESKGRSDIWSAVTQSDDMQKLKHMINYDWLLDRVDQFPEVLQDAREVFVQVKQRALDELERGSKNLTVIHGDFYPQNILLQAEPLSVGCLTPLYVVDWENAQLGLPAMDHGGMMGEMYVLWLCHGIEAGLWMMQGYAKGLATLPEETKWRVAVQIGVHILSFWTFGREGPVGEFARQGRDIVANAWGKNRAWFETSELSCLFLGTS

SEQ ID NO: 13 - protein, 309 aa, Psilocybe cubensis
MHIRNPYRTPIDYQALSEAFPPLKPFVSVNADGTSSVDLTIPEAQRAFTAALLHRDFGLTMTIPEDRLCPTVPNRLNYVLWIEDIFNYTNKTLGLSDDRPIKGVDIGTGASAIYPMLACARFKAWSMVGTEVERKCIDTARLNVVANNLQDRLSILETSIDGPILVPIFEATEEYEYEFTMCNPPFYDGAADMQTSDAAKGFGFGVGAPHSGTVIEMSTEGGESAFVAQMVRESLKLRTRCRWYTSNLGKLKSLKEIVGLLKELEISNYAINEYVQGSTRRYAVAWSFTDIQLPEELSRPSNPELSSLF

SEQ ID NO: 14 - protein, 309 aa, Panaeolus cyanescens; identical to SEQ ID NO: 6

SEQ ID NO: 15 - protein, 523 aa, Oryza sativa
MELTMASTMSLALLVLSAAYVLVALRRSRSSSSKPRRLPPSPPGWPVIGHLHLMSGMPHHALAELARTMRAPLFRMRLGSVPAVVISKPDLARAALTTNDAALASRPHLLSGQFLSFGCSDVTFAPAGPYHRMARRVVVSELLSARRVATYGAVRVKELRRLLAHLTKNTSPAKPVDLSECFLNLANDVLCRVAFGRRFPHGEGDKLGAVLAEAQDLFAGFTIGDFFPELEPVASTVTGLRRRLKKCLADLREACDVIVDEHISGNRQRIPGDRDEDFVDVLLRVQKSPDLEVPLTDDNLKALVLDMFVAGTDTTFATLEWVMTELVRHPRILKKAQEEVRRVVGDSGRVEESHLGELHYMRAIIKETFRLHPAVPLLVPRESVAPCTLGGYDIPARTRVFINTFAMGRDPEIWDNPLEYSPERFESAGGGGEIDLKDPDYKLLPFGGGRRGCPGYTFALATVQVSLASLLYHFEWALPAGVRAEDVNLDETFGLATRKKEPLFVAVRKSDAYEFKGEELSEV

SEQ ID NO: 16 - protein, 263 aa, Homo sapiens
MKGGFTGGDEYQKHFLPRDYLATYYSFDGSPSPEAEMLKFNLECLHKTFGPGGLQGDTLIDIGSGPTIYQVLAACDSFQDITLSDFTDRNREELEKWLKKEPGAYDWTPAVKFACELEGNSGRWEEKEEKLRAAVKRVLKCDVHLGNPLAPAVLPLADCVLTLLAMECACCSLDAYRAALCNLASLLKPGGHLVTTVTLRLPSYMVGKREFSCVALEKEEVEQAVLDAGFDIEQLLHSPQSYSVTNAANNGVCFIVARKKPGP

SEQ ID NO: 17 - protein, 113 aa, Aspergillus flavus
MTRAKLEHAWSLGSRLQGPYVEKGLQYLLQLHDHIQISDRELQIKVEHDDRSDTPKTTPLMWNYEMRSEDPSPLTKIYLHVHGENDLKIATGVAHFMEEIGMVDTGKTYLDTI

SEQ ID NO: 18 - protein, 463 aa, Penicillium expansum
MEGCTTRDSTGLGLGERFNQRGNVFLRLVSHVQCAIKFAKNHNLRLVIRNTGHDGSGRSSAPGSFEIHTHHLKHTHYHDDFQPVGAVTTSGPAVTVGAGVILGDLYAEGARQGYTVVGGVCPTVGFVGGFLQGGGVSGKFSHNRGLAVDNVLEIQAVTADGDLVVANDYHNQDLFWALRGGGGGTFAVVTQATVRVFPDVPCVTTQLAVSAPEGLDDHSWMQVLELLLRGLRSFNEERIAGEFHLRPDPLSAILTLHFLNTSDLDSVDRRLAALIDKFRTSEIPHIYSSKSHALEVPRSVEAKLYASHELTSVQMPVLYSLDPSYKVSYLNMGDPNDADFRNVYWGPNYERLLALKQKWDVDALFITRLGKRHDVMNTIPSTGAGADMRSFNRDIYDLLRNHAEDPRLNEVWTAINTVTEWVDWITSNGARMIPSDIAFRFWMLRVYMTHDWGCGLTSSTAEL

SEQ ID NO: 19 - protein, 671 aa, Phaeodactylum tricornutum
MERGVGGRIEDAFAAAKEQGEAAFVTFVTAGYPTAADTPAILMAMQEGGAALIELGIPYTDPQADGATIQHTNQVAIKGGTSEIHQCLDMVKKSREMGLTVPVVLMGYYNPFLQYDVDKLCEETKAAGADGFIVVDLPPEEGIALNKACIANGLSNIPLVAPTSSDKRIASLTDMASTFLYCVSVTGVTGARESLPPDLEEFITRVRSKTELPLAVGFGISNPEMVNGVANMADGVVVGSAILKAMDSLGDTATTEQRADAIRESTKLGQIPAEWTLGENNSRFGKFGGQYIPETLSVAFEEIEASYNELKDDPSFLAELDEYRRDFVGGPTPLHRADRLTELAGGATIWLKREDLAHTGAHKINNAIGQALLAKRIGKPRIIAETGAGQHGVATATICAKLGLDCTVYMGAVDCERQKLNVFRMNTLGAKVVPVQDGQRTLKDAINEAMRDWVTNVRDTHYLIGSAVGPHPFPTIVRDFQSVMGREMRAQMLERAGKLPDAVVACVGGGSNAIGAFHPFVNDETVELHGVEAAGYGIDKDEEHCATLTKGTPGVLQGAMTYVIQQKSGQTLNTHSISAGLDYPGVGPEHAFLKDSGRAVYEAVTDDEALEGFKLMCEYEGIIPALETSHAIYYAVKLAKKLGPGKDIVINMSGRGDKDMPQIAKIMGVEV

SEQ ID NO: 20 - protein, 684 aa, Thalassiosira pseudonana
MTTSSSMARGHNGRIEQAFAEAKDRGEAAFVTFVTAGFPVKEDTPAILLAMQAGGASVIELGIPYTDPQADGTTIQQTNQVAIKAGTSDITQCLSMLESARSQGLTVPVVLMGYYNPFFQYGIESMCKKAKECGADGFIVVDLPPEEGADLAKACNKYGLSNIPLIAPTTTDERIGHLAKTASTFIYCVSTTGVTGARSELPSDLDDFIKRVRSKTDLPLAVGFGISNATMVQSVANIGDGVVVGSAILRAVQSAGDSTEERVEAVKKIVSELSAGCKQGGDDEVADQIAALNINKRFGKFGGQFIPETLSEAFREIEAEYEKVKNDPAFLAELDVYRRDFVGGPTPLHKAERLTEMCGGATIWLKREDLAHTGAHKINNAVGQALLAKRIGKPRIIAETGAGQHGVATATICAKLGLDCTVYMGAVDCERQKLNVFRMNTLGAKVVPVKEGQATLKDAINEAMRDWVTNVRDTHYLIGSAVGPHPFPTIVRDFQSVMGKEMKAQMLDKAGKLPDVVIACVGGGSNAIGAFHPFVEDKTVELHGVEAAGHGIDKDEQHCATLTKGTPGVLQGAFTYVIQEKSGQTLNTHSVSAGLDYPGVGPEHAFLKDSGRAKYTAVTDDEALEGFKMMCQYEGIIPALETSHAIYYAIQLAKTLGKDKDIVINMSGRGDKDMPQSWSLSGEN

SEQ ID NO: 21 - protein, 448 aa, Chlamydomonas reinhardtii
MNITAPTRLDSRPVASARSSARSVAPRVASRKSTVRIAAVAAPERPITDYQRPDANGRYGQFGGKYVPETLIPALEQLEKDYNEAIADPAFKAEMEAILKDYVGRETPLYHAERLSAHYKTADGGHAEIYLKREDLNHTGAHKINNSLGQALLCKRLNKQRIIAETGAGQHGVATATICARLGLKCIVYMGAKDMERQALNVFRMRLCGAEVRPVHSGTATLKDATSEAIRDWVTNVETTHYILGSAAGPHPYPMMVREFQSVIGRETKVQAQEKWGGLPDIVMACVGGGSNAIGIFNEFINDTSVRLIGVEAGGEGVNTTKHAATLTMGTPGVLHGSYSYLLQDDDGQIIDPHSISAGLDYPGIGPEHSFLKDVKRAEYYAVTDAEALEGFQLLSKLEGIIPALETSHAIAYLEKLIPTLKSGTRVVINCSGRGDKDVNNAMKYINP

SEQ ID NO: 22 - protein, 768 aa, Emericella nidulans
MADTALVDHSPHHPTKAPRLETASNVILIDNYDSFTWNVYQYLVLEGATVTVIRNDEISLEELIAKKPTQLVVSPGPGHPKSDAGISNAAIQYFAGKIPIFGVCMGQQCIIHSFGGKVDVTGEILHGKTSVLKHDGRGAYEGLPPSVIITRYHSLAGTHSTIPECLEVSSFAQLGEDADKTVIMGVRHKQFAVEGVQFHPESILTEHGQTMFRNFLKLTAGTWEGNGKDVAQGGNFTAAAPNPPKATKKVSILEKIYDHRRAAVAKQKTIPSQRPSDLQAAYELSVAPPQISFPDRLRQSAYPLSLMAEIKRASPSKGLIAEHACAPAQARQYAKAGASVISVLTEPEWFKGSIDDLRAVRASLEGLTNRPAILRKEFIFDEYQILEARLAGADTVLLIVKMLDTELLTRLYLYSQSLGMEPLVEVNTPDEMKIAVDLGAQVIGVNNRDLTSFEVDLGTTSRLMDQVPESTIVCALSGISGPKDVEAYKKDGVKAILVGEALMRAPDTAAFVAELLGGQSKKLPLQSRNSPLVKICGTRTEEGARAAIEAGADLIGIILVEGRKRTVPDDVALQISKVVKSTPRPTPYPTEVPQGDTDATSVDYFDHSATTLRHPTRALLVGVFLNQPLSYVLAQQQKLGLDVVQLHGSEPLEWSRLIPVPVIRKFGLDEFGIARRAYHTLPLLDSGAGGSGELLDQMRVKQILKSDDGLRVILAGGLDPLNVTEIIKQLDESGYKIVGVDVSSGVETNGVQDLDKIRSFVQAAKSAF

SEQ ID NO: 23 - protein, 480 aa, Homo sapiens
MNASEFRRRGKEMVDYMANYMEGIEGRQVYPDVEPGYLRPLIPAAAPQEPDTFEDIINDVEKIIMPGVTHWHSPYFFAYFPTASSYPAMLADMLCGAIGCIGFSWAASPACTELETVMMDWLGKMLELPKAFLNEKAGEGGGVIQGSASEATLVALLAARTKVIHRLQAASPELTQAAIMEKLVAYSSDQAHSSVERAGLIGGVKLKAIPSDGNFAMRASALQEALERDKAAGLIPFFMVATLGTTTCCSFDNLLEVGPICNKEDIWLHVDAAYAGSAFICPEFRHLLNGVEFADSFNFNPHKWLLVNFDCSAMWVKKRTDLTGAFRLDPTYLKHSHQDSGLITDYRHWQIPLGRRFRSLKMWFVFRMYGVKGLQAYIRKHVQLSHEFESLVRQDPRFEICVEVILGLVCFRLKGSNKVNEALLQRINSAKKIHLVPCHLRDKFVLRFAICSRTVESAHVQRAWEHIKELAADVLRAERE

SEQ ID NO: 24 - protein, 480 aa, Mus musculus
MDSREFRRRGKEMVDYIADYLDGIEGRPVYPDVEPGYLRPLIPATAPQEPETYEDIIKDIEKIIMPGVTHWHSPYFFAYFPTASSYPAMLADMLCGAIGCIGFSWAASPACTELETVMMDWLGKMLELPEAFLAGRAGEGGGVIQGSASEATLVALLAARTKVIRQLQAASPEFTQAAIMEKLVAYTSDQAHSSVERAGLIGGIKLKAVPSDGNFSMRASALREALERDKAAGLIPFFVVATLGTTSCCSFDNLLEVGPICNQEGVWLHIDAAYAGSAFICPEFRYLLNGVEFADSFNFNPHKWLLVNFDCSAMWVKRRTDLTGAFNMDPVYLKHSHQDSGFITDYRHWQIPLGRRFRSLKMWFVFRMYGVKGLQAYIRKHVELSHEFESLVRQDPRFEICTEVILGLVCFRLKGSNELNETLLQRINSAKKIHLVPCRLRDKFVLRFAVCARTVESAHVQLAWEHISDLASSVLRAEKE

SEQ ID NO: 25 - protein, 480 aa, Rattus norvegicus
MDSREFRRRGKEMVDYIADYLDGIEGRPVYPDVEPGYLRALIPTTAPQEPETYEDIIRDIEKIIMPGVTHWHSPYFFAYFPTASSYPAMLADMLCGAIGCIGFSWAASPACTELETVMMDWLGKMLELPEAFLAGRAGEGGGVIQGSASEATLVALLAARTKMIRQLQAASPELTQAALMEKLVAYTSDQAHSSVERAGLIGGVKIKAIPSDGNYSMRAAALREALERDKAAGLIPFFVVVTLGTTSCCSFDNLLEVGPICNQEGVWLHIDAAYAGSAFICPEFRYLLNGVEFADSFNFNPHKWLLVNFDCSAMWVKKRTDLTEAFNMDPVYLRHSHQDSGLITDYRHWQIPLGRRFRSLKMWFVFRMYGVKGLQAYIRKHVKLSHEFESLVRQDPRFEICTEVILGLVCFRLKGSNQLNETLLQRINSAKKIHLVPCRLRDKFVLRFAVCSRTVESAHVQLAWEHIRDLASSVLRAEKE

SEQ ID NO: 26 - protein, 510 aa, Drosophila melanogaster
MSHIPISNTIPTKQTDGNGKANISPDKLDPKVSIDMEAPEFKDFAKTMVDFIAEYLENIRERRVLPEVKPGYLKPLIPDAAPEKPEKWQDVMQDIERVIMPGVTHWHSPKFHAYFPTANSYPAIVADMLSGAIACIGFTWIASPACTELEVVMMDWLGKMLELPAEFLACSGGKGGGVIQGTASESTLVALLGAKAKKLKEVKELHPEWDEHTILGKLVGYCSDQAHSSVERAGLLGGVKLRSVQSENHRMRGAALEKAIEQDVAEGLIPFYAVVTLGTTNSCAFDYLDECGPVGNKHNLWIHVDAAYAGSAFICPEYRHLMKGIESADSFNFNPHKWMLVNFDCSAMWLKDPSWVVNAFNVDPLYLKHDMQGSAPDYRHWQIPLGRRFRALKLWFVLRLYGVENLQAHIRRHCNFAKQFGDLCVADSRFELAAEINMGLVCFRLKGSNERNEALLKRINGRGHIHLVPAKIKDVYFLRMAICSRFTQSEDMEYSWKEVSAAADEMEQEQ

SEQ ID NO: 27 - protein, 486 aa, Sus scrofa
MNASDFRRRGKEMVDYMADYLEGIEGRQVYPDVQPGYLRPLIPATAPQEPDTFEDILQDVEKIIMPGVTHWHSPYFFAYFPTASSYPAMLADMLCGAIGCIGFSWAASPACTELETVMMDWLGKMLQLPEAFLAGEAGEGGGVIQGSASEATLVALLAARTKVVRRLQAASPGLTQGAVLEKLVAYASDQAHSSVERAGLIGGVKLKAIPSDGKFAMRASALQEALERDKAAGLIPFFVVATLGTTSCCSFDNLLEVGPICHEEDIWLHVDAAYAGSAFICPEFRHLLNGVEFADSFNFNPHKWLLVNFDCSAMWVKRRTDLTGAFKLDPVYLKHSHQGSGLITDYRHWQLPLGRRFRSLKMWFVFRMYGVKGLQAYIRKHVQLSHEFEAFVLQDPRFEVCAEVTLGLVCFRLKGSDGLNEALLERINSARKIHLVPCRLRGQFVLRFAICSRKVESGHVRLAWEHIRGLAAELLAAEEGKAEIKS

SEQ ID NO: 28 - protein, 500 aa, Catharanthus roseus
MGSIDSTNVAMSNSPVGEFKPLEAEEFRKQAHRMVDFIADYYKNVETYPVLSEVEPGYLRKRIPETAPYLPEPLDDIMKDIQKDIIPGMTNWMSPNFYAFFPATVSSAAFLGEMLSTALNSVGFTWVSSPAATELEMIVMDWLAQILKLPKSFMFSGTGGGVIQNTTSESILCTIIAARERALEKLGPDSIGKLVCYGSDQTHTMFPKTCKLAGIYPNNIRLIPTTVETDFGISPQVLRKMVEDDVAAGYVPLFLCATLGTTSTTATDPVDSLSEIANEFGIWIHVDAAYAGSACICPEFRHYLDGIERVDSLSLSPHKWLLAYLDCTCLWVKQPHLLLRALTTNPEYLKNKQSDLDKVVDFKNWQIATGRKFRSLKLWLILRSYGVVNLQSHIRSDVAMGKMFEEWVRSDSRFEIVVPRNFSLVCFRLKPDVSSLHVEEVNKKLLDMLNSTGRVYMTHTIVGGIYMLRLAVGSSLTEEHHVRRVWDLIQKLTDDLLKEA

SEQ ID NO: 29 - protein, 487 aa, Bos taurus
MNASEFRRRGKEMVDYVADYLEGIEGRQVFPDVDPGYLRPLIPTTAPQEPETFEAIIEDIEKIIMPGVTHWHSPYFFAYFPTASSYPAMLADMLCGAIGCIGFSWAASPACTELETVMMDWLGKMLQLPEAFLAGEAGEGGGVIQGTASEATLVALLAARTKVTRHLQAASPELMQAAIMEKLVAYASDQAHSSVEKAGLIGGVRLKAIPSDGKFAMRASALQEALERDKAAGLIPFFVVATLGTTSCCSFDNLLEVGPICHEEGLWLHVDAAYAGSAFICPEFRHLLNGVEFADSFNFNPHKWLLVNFDCSAMWVKKRTDLTGAFRLDPVYLRHSHQDSGLITDYRHWQLPLGRRFRSLKMWFVFRMYGVKGLQAYIRKHVQLSHAFEALVRQDTRFEICAEVILGLVCFRLKGSNKLNEALLESINSAKKIHLVPCSLRDRFVLRFAICSRTVELAHVQLAWEHIQEMAATVLRAQGEEKAEIKN

SEQ ID NO: 30 - protein, 905 aa, Caenorhabditis elegans
MSEKGETLIEDTAEIEFEQTVDKTQQWGRLKNAAAFSLFRDLHMNESLQRKHARSDYKVYDLNNRVIFHVINTTAMPITKDGPFCLKVMNKDKKSVAKFLRNEPKRSYKQTGLASLFGCCSDTEDTMEVLDDNGLIIATSFLHHDQFRGILITMKDPAGKVLIGIQASRDQKDVFAVSGPDNRYLGEIRQKIISSGNSTDNYKGVACWFSTEVSLNVKVFFMAAAFLIEIDYFSETKSRQAPFRTPEADYLNPIIKTPPHNERVPKMKTNISKTRKKKGKVSDASKDSRPSETKKETLMMPEIHHTKHFDSIGGEEQAFAKKEKVEEFKPTEAVKEEVDVNGMSRDQFRNAAKKVVDYLMKQDESIRAARCSPALKPGYLKALLPPKAPQKAEDIDDILEDYHKLIVPGLSHSSHPNFHSFYPAGNSFHCLLADLLGGHIGDAGFYWTSNPALTELEVLMMDWLGEMMALPKEFLLFPEASRGGGCMQRSDTESNFLVLVAARTDMIRRMKQRDKRLRSSDILARLVAYTSSDARRSIKMKMAAEVAMVKMRVLPTDQNFILRGDTLHAAIMADIERGLIPFFVGANFGTSGPCSFDHLHELGPVCREHGTWLHVDAAYAGTALICPEIRGLMRGIDWADSFCTTPSKLIIAVCDVCCLWVRDRHKLQHASLENHPDLPFKGLPTSQRVGALKIWFMIRSFGVENLQNQIREHIRLGQVMTKILQKDLRFEVCNKVVMGLICFRAKSNDMFNKALLYRCNETGNVSLASCVLQNKFVIRMCINSPKCSEEDLDSAYKLICNEYDILKPFQYRIEVMNQAELETFIRDPAKIHSSAEVSRRFPVVNPLEPCRSLAQISSQMHTAEYADPPGKSNKSPQVAAKGELPSAAPPSSRTPNSDISEKSDR

SEQ ID NO: 31 - protein, 490 aa, Ruminococcus gnavus
MSQVIKKKRNTFMIGTEYILNSTQLEEAIKSFVHDFCAEKHEIHDQPVVVEAKEHQEDKIKQIKIPEKGRPVNEVVSEMMNEVYRYRGDANHPRFFSFVPGPASSVSWLGDIMTSAYNIHAGGSKLAPMVNCIEQEVLKWLAKQVGFTENPGGVFVSGGSMANITALTAARDNKLTDINLHLGTAYISDQTHSSVAKGLRIIGITDSRIRRIPTNSHFQMDTTKLEEAIETDKKSGYIPFVVIGTAGTTNTGSIDPLTEISALCKKHDMWFHIDGAYGASVLLSPKYKSLLTGTGLADSISWDAHKWLFQTYGCAMVLVKDIRNLFHSFHVNPEYLKDLENDIDNVNTWDIGMELTRPARGLKLWLTLQVLGSDLIGSAIEHGFQLAVWAEEALNPKKDWEIVSPAQMAMINFRYAPKDLTKEEQDILNEKISHRILESGYAAIFTTVLNGKTVLRICAIHPEATQEDMQHTIDLLDQYGREIYTEMKKA

SEQ ID NO: 32 - protein, 453 aa, Penicillium expansum
MGTHDMSPNASHSYIYRVLSDILEFPDNEQRMWWHSVAPMFAEMLRACGYDIHEQYKILGIWKKAVIPFLGCYPTNDGPRWLSILTRYGTPFELSLNCSHRLVRYTFEPINAATGTDKDPFNTQAIWESLSQLRRLNGDVDTELFNHFKANLTVDNAESAHLVESNLAGSKIRTQNKLALDLQNGSFVVKAYFYPTLKSAATGRSITDLMLSSVRQQVQKWSPTLAQPLSVLEEYIEARGPDSTASPRLLSCDLINPERARTKIYLLERQVSIEAMEDLWTLGGRRKSDSALAALDIIREIWSLIQLPPCLASYPSGYLPLGTVPDEQLPLMVNYTLRPDDPMPEPQVYFTTFGQNDLHVTNALTAFFERQGWTELAESYKENLRAYYPHADQETANYIHAYVSFSYRKGVSYMSVYLQTLETGDWPITYSPKRQYLCNEHPIHLKELAKACA

SEQ ID NO: 33 - protein, 514 aa, Oryza sativa
MGSLDTNPTAFSAFPAGEGETFQPLNADDVRSYLHKAVDFISDYYKSVESMPVLPNVKPGYLQDELRASPPTYSAPFDVTMKELRSSVVPGMTHWASPNFFAFFPSTNSAAAIAGDLIASAMNTVGFTWQASPAATEMEVLALDWLAQMLNLPTSFMNRTGEGRGTGGGVILGTTSEAMLVTLVAARDAALRRSGSDGVAGLHRLAVYAADQTHSTFFKACRLAGFDPANIRSIPTGAETDYGLDPARLLEAMQADADAGLVPTYVCATVGTTSSNAVDPVGAVADVAARFAAWVHVDAAYAGSACICPEFRHHLDGVERVDSISMSPHKWLMTCLDCTCLYVRDTHRLTGSLETNPEYLKNHASDSGEVTDLKDMQVGVGRRFRGLKLWMVMRTYGVAKLQEHIRSDVAMAKVFEDLVRGDDRFEVVVPRNFALVCFRIRAGAGAAAATEEDADEANRELMERLNKTGKAYVAHTVVGGRFVLRFAVGSSLQEEHHVRSAWELIKKTTTEMMN

SEQ ID NO: 34 - protein, 454 aa, Penicillium expansum
MNSPTASDPIVRTLDAPETKDMQEAFLPGESPQDVASVIQETMDIFDKRMRLTHPHCFCYVPSCPSPLAWVGDLFTSLYNVNAVSWDVSSGPSAMEQGMIRWLAQQVGLPPSAGGCFVSGGSMANLSAVVAARDKLLPPMRRAEGTIYTSDQTHISIKKCLHIIGFDEHQIRVIPTDHLFRMDTDILRRTIAADRQCGRLPFLVVASCGTTNTGSIDPLHALADVAEEEGLWLHVDGAYGASIALSDKYRHLVDGIGRADSISWDGHKWLFQTYGCGIVLTRDSASLAHSFAVDAEYINSTTPHGAVNFYNLSPELSRPARAMPLWFTLRVLGRRQMGEMIDQGFLLARTAEEEIRRYPHWVILAPVTASIVVFRYCPLGLKDDDLDTLNLALSARLLAENVASILTTNIRGRVALRFCATNPATQADTITKVVQQMDQMANTMPTCGLGMCKE

SEQ ID NO: 35 - protein, 423 aa, Gymnopilus junonius
MSSPRIVLHRVGGWLPKDQNVLEAWLSKKIAKAKTRNRAPKDWAPVIQDFQRLIETDAEIYMGFHQMFEQVPKKTPYDKDPTNEQWQVRNYMHMLDLFDLIITEAPDFEQNDLVGFPINAILDWPMGTPGGLTAFINPKVNIMFHKMFDVWAVFLSSPASCYVLNTSDSGWFGPAATAAIPNFKETFICDPSLPYLGYTSWDNFFTRLFRPGVRPVEFPNNDAIVNSACESTVYNIAPNIKPLDKFWIKGEPYSLNHILNNDPYASQFVGGTISQAFLSALNYHRWASPVNGNIVKVVNVPGTYYAESPVTGFGNPEGPDPAAPNLSQGFITAVAARALIFIEADNPNIGLMCFVGVGMAEVSTCEVTVSVGDVVKKGDEIGMFHFGGSTHCLIFRPQTKITFNPDYPVSTAVPLNAAVATVV

SEQ ID NO: 36 - protein, 715 aa, Dictyostelium discoideum
MNYLKPTIFLILCLVTFVYSQPSTLTIQGTIFDQHPDYNNNFEPKGGSIKKNLVLKTLGSSKVPTLVSLDPEDDTNEDGRMITPSLFQYFYQTSSKPLTKNSGANVPIPINLVLNYDSKKQVYVYNDQYFFPIDYQGFDVDSKYRTYNNGSGYHNFHFCLKLNTKFTYQGIEDFYFIGDDDVWVFINNKLVVDLGGLHSRETGSVDVTKLGLTKGSTYDFDFFYCERHTTASTIRIETNLQVFCPWYDYCGVCSGDGSTCCNKDTTCNDGKKCTIDACPPPKTVINKAGSKITDADIAPYCSHTDVSCPDPDLCNNNNCDASTGNCKTTPITCSNQDSKCLLAQTCDPKSGCIYKSKCTGVCDTGVCDGGDCVQKSNSTCANELGNNPCMVYSCGKNGCEAKPKCPQNPSTPCDVAYCDAGECKVQHLSASECNCGCDASDLCSKNNCVNNVCVPLPIDGIDDGNACTKDTCVNGNIFHTPINKCSGCMTCNPVSGNCDLSDTVCQDGNECTTNVCESSDSVLGVCTNSTVECGATNTDKCIQFSCNEATGCQQSAVVCPDVGSCLVGYCDSKQGCLTKPRSCDTGVFCLTGECIENAGGCIVYEKRCDADNGRCQQGVCVNNTATEEGYCKSEDYDPLPFICKTGAVVSTAVIAGVTVAGAVALGVFIYGGKRGYDYWKESRNVQFSGSNSNPLYEQNPNGSGVNPLYNDNSAL

SEQ ID NO: 37 - protein, 501 aa, Lachnellula willkommii
MGIPITSPYITLLSAAGLVIVLAIFKFRNRRTLPYPPGPPGEFLIGHLRVIPFEDSPTAYLNWGREYKSDVLYFNTLRQPIIVLNSVKACVDLLDKRGANYADRPRFVLLELLGWGMTLTWLRWSPKMQQHRRMLQSPFTKSKVSQYQSLQMKETHRLVKGMMKSPLDWELELRRFAIAVVANVGYGVDINTVDHQWVDLSDAAGYATSHAGAPGGTIVDRFPPVRYLPDWLPGLRALKYAHDNKSAIEEGVTNSSFIHNLLEKYMSNEKRSLPNEFTLADIKGSAAAIIIAGSDTTMTTLVVFILMMMCNQEVRKKAQAEVDAAIGSDRLPEFDDLEGLKYLNYTRLEVLRIAPLSPLGIPHRNLKDDEYKGMLIPKGSIIYQNVFAMHRDPDVYSNPYDFDPDRYIPKSEGGRGEPYPVGNFGFGRRVCPGQYLANNTVSIVMATILSTLNIDWPIGPSGKPTPFEPGWSKIGQYHPLEFQCTMEPRSETAKDLIYKSI

SEQ ID NO: 38 - protein, 476 aa, Lachnellula cervina
MEIPIMSPYATLLSAAGLVIVLAIFKFRTRRTLPYPPGPPGEFLIGHLRVIPFEDSPTAYLNWGREYKSDILYFNTLRQPIIVLNSVKACVDLLDKRGANYADRPRFVLLELLGWGMTLTWLRWSPKMQQHRRMLQSPFTKSKVSQYQSLQINETHRLVKGIMKSPLDWELELRRFAIAVVANVGYGVDINTVDHQWVDLSDAAGYATSHAGAPGGTIVDRFPPVRYLPDWLPGLRALKYAHDNKSAIEEGVTNSSFIHNLLEKYTSNEKQGLPNDFTLADIKGSAAAIIIAGSDTTMTTLVVFILMMMCNPEVQKKAQAEVDAVIGSDRLPEFDDLEGLTYLNYIRLEVLRIAPLSPLGIPHRNLKDDEYKGMLIPKGSIIYQNVFAMHRDPNVYSNPYNFDPDRYIPKSESGRGEPFPVGNFGFGRRVCPGQYLANNTVFIVMATILSTLNIDWPVGPSGNPTPFEPGWSKIGQ

SEQ ID NO: 39 - protein, 563 aa, Gymnopilus dilepis
MQGNPAVLLLLLTLTLCVYYAHSRRARRARLPPGPPGIPLPFVGNLFDMPSNSPWLTYLQWGETYQTDIIYLNAGGTEMVILNTLEAITDLLEKRGSIYSGRFESTMVNELMGWDFDLGFITYGERWREERRMFSKEFNEKNIKQFRHAQIRAANLLVGQLTKTPERWHQLIRHQIAAMSLDIGYGIDLLEGDPWLEATQLANEGLAIASVPGSFWVDSLPILKYMPSWFPGAEFKRKAKVWRESTDHMINMPYEKMKKLMVQDLVRPSYASARLQEMDPNGDLQHQEHVIRNTAMEVNVGGADTTVSAVAAFILAMVKYPDVQRKVQAELDAVGCRDELPEFDEDNDALPYLTACVKEIFRWNQVAPLAIPHRLDKDDHYRGYIIPKNALVFANTWAVLNDPSVYPDPSEFRPERYLGPDGKPDPRIRDPRKAAFGYGRRACPGIHLAQSTVWIVGATLLSVFDIERPMDANGKPIDIPAAFTTGFFRYSIHDCLVVETMHPANTVCVDIPNPSDADSFLVPKRLSNPHPIIDLPSRNPACQEDGVVALSNAWRSTLPVQDV

SEQ ID NO: 40 - protein, 516 aa, Lachnellula cervina
MLSLLPIILPLLALTLIGLKLRSRQVHKKPLAPPGPRADPIIGHVRLVPASRPELTYMKWGKQYSLSPPRVKTVEDALIILRCCSDTDYLHLNFLGQPVIVLNSSEAAVAILERRSANYSGRPMLYSFMEQGWSRRYTMAVIQGGVQMKKHRKMVQKAFTQNNCLPYREAQQEEARKLVKRIISTPEDWREHTQLLATTLILRVGYGIDAQDKDDPYVKIADKASDAISKGGAPGSTALDVFPFIRYLPSWFKLIPSLKFARECSPWVARLHEEPFQFVQQEMEAGTAKPSFVQKLLAERPEKESISALPTDSELITDADIKGSAGSLYGAGQDTTWSTLVVFVLSMVLNPQIQENGKEELISVLGHDSLPTFADRDKLPYVEYILQETFRWGPVVPLGIPHKSAVDDTYKDYFIPAGSLVVANAYAMNRDERFHSDPTAFKPDRYIAKEKGGLGEPYPIGHFGFGRRVCPGMQLGEASVWIGIATMLATLKFSKAKDPEGNEITPDPKWTTGITR

SEQ ID NO: 41 - protein, 727 aa, Cavenderia fasciculata
MFRHFVGALLLCIGIFAIFSYAQNSMPMTVAIFDHHPSKDSNFEPADGSLTQGLVKKTLNPVTKVPELVSLDVNNAINVKGRIYEPNKFQYFFASDFTPAASTRFLNTTINLSKTGDYFEYFNDYFFPIDGTSSKRLGFDAESGYKLYYDGKTYHNYHFCLKMNTYFKYEVTDPVMQFNFRGDDDVYVFINNQLALDLGGLHTYQDGSITFDTKTVNNLGLKNGTIYPFDFFYCERHTTGSHMRFQINFPLDCSQKDFCGVCNGNGECCNPNLCTKYASGPDATKCKVGKCPPWNTPISDISQLPSYCIYTDVDYSSKNTKCATYTCDKNTGNPVATPTTCPALACTTQTCDPAQGCQYKSTCQPENICRVATCGSNNSTCNRADKDCSNFGTDKCKTYFCDTNVAGGCTSKAKCGSTVIENGVVNPCKYYTCDSAVGDCVVNTIANCDACTGTPAPCQVYDKCDANTGKWTFKPNPAIIDGNACTQDLCDPVSGAITHPFISCSGCTSCNPADNAYACKAVDNACQSIEFSNACTNNVCLTNGTCSYPAKPLPENPDACSYYTCDAQEGFQLNNVTCPDGEGACQVGVCDAKLGCQIAAKNCTSPDFCLEGYCDDRLGCLKIERQCTPGRPNCQVGVCNNETAECEYHDRDPYPFACKTAAVVSVGVIAGVVVAGAVALGVAVFGGKKGYDYWKEHRENKISAATSNPLYETKPGTGENPLYNPND

SEQ ID NO: 42 - protein, 523 aa, Gymnopilus junonius
MMSEMNGMDKLALLTTLLAAGFLYFKNKRRSALPFPPGPKKHPLLGNLLDLPKKLEWETYRRWGKEYNSDVIHVSAGSVNLIIVNSFEAATDLFDKRSANYSSRPQFTMVRELMGWNWLMSALIYGDKWREQRRLFQKHFSTTNAELYQNTQLEYVRKALQHLLEEPSDFMGITRHMAGGVSMSLAYGLNIQKKNDPFVDLAQRAVHSITEASVPGTFWVDVMPWLKYIPEWVPGAGFQKKARVWRKLQQDFRQVPYQAALKDMASGKAKPSFASECLETIDDNEDAQRQREVIKDTAAIVFAAGADTSLSGIHTLFAAMLCYPEVQKKAQEELDRVLGGRRLPEFTDEPNMPYISALVKEILRWKPATPIGVPHLASEDDVYNGYYIPKRAVVIGNSWAMLHDEETYPDPSTFNPDRFLTTNKSTGKLELDPTVRDPALMAFGFGRRMCPGRDVALSVIWLTIASVLATFNITKAIDENGKELEPDVQYWSGLIVHPLPFKCTIKPRSKAAEELVKSGADAY

SEQ ID NO: 43 - protein, 508 aa, Psilocybe cubensis; identical to SEQ ID NO: 4

SEQ ID NO: 44 - protein, 728 aa, Dictyostelium discoideum
MKKTFIFLYCVVLFISTTLAVEMKKTQDFNLRIFDQHPKYNNNFEPENGVLTVNLVKSILNETTGIPELTTMSNLTTVNKQGRIYSPELFKYFFADNSDAPDRNNSGKNYPLDITLTMNLDDKSNYFYDNQEFFPIDGRGFDVDQQFRNYYDDESKANPKPYHNYHFCAKITNSRFTYKGFETFRFVGDDDVWVFIDRKLVVDLGGLHIAQEKTIDLTKLGLVVNKLYVIDFFYCERHTSRSTIRIETTIELQCPWYDFCGVCTGNGLSCCNVTRDCDDGNPCTIDLCPEPTAVFDLKDISANCRHQDRTPTDWSVTDKCNTGKCNVSTGIFVTNITKCIPQNSCKAEDHCDSGLGCIFKNLCTDVCSTGACVDGKCETKNSKICIDELDKGVEDKCYEYSCDPNVGCTKKPRCLQKSENYNPCLNSFCEVSTGECKNTTIPPNLCDCQCDGKLNKCQIKSCNADGSCKPLPSLEIDDKNPCTIDACDETTGVITHTLSNKCGGCSICNGVTGDCDPVDKKCDDGNRCTTEVCLLDKATNNGNCSSKPTTECDKGDVCMVYSCDTEKGCVETPRVCPSKGKCQVGKCVPGVGCKYEPRVCKADAFCLVAECDEIVGCIQFEKKCAADNGRCQAGICKNATATEEGTCESVDFDPKPFICKTAAVVSVGVAVGVAVGGAIALGVFIFAGKKGYDYWKASQGVTMATSNANPLYESNPSGGENPIYTSPN

SEQ ID NO: 45 - protein, 1000 aa, Hondaea fermentalgiana
MGGVKRPRAWVVATLVAATALAKDASAQVTSARDSIQYRATVRSFQPFFCTPDLDKDTLLEIYPSALDPTAAVRQFAKWREDDDGGIKEANCPYADELLDGTISGHPDFQPTGDIISYARNRGTLQDETLVNQAGIPKPQYCSDSDACGGCSGSGSNTCKTAGPEAFSSWYNDNARYNKRVGFSLYLYLDGDRDEACATNDFDNDTVCEYFFDSATDDEVEGPDSDNDGFFGPLNAYATGGATPVTQALYPDEESAPVWPVTQYEDNNWPGKKFWFTTEIHTYFKYRGDEYFEFSGDDDVWVFINGQLALDLGGVKSAQDDSINLAKVGASLGLEQGQIYAFDLFHAERQTSASNFAVTTTISESCNVLLSGSTAQAFPETAVASDFFVSQVDFADNGLYLAQQGAPDTPSYAYAESQFNVGTGFKTSFSFTVGSEGQAQGFAFVVHQLERGLVDLPITTMGGLNCRYYTNAMAVVFDMCADRQDAAADCSLQQVRLHYPSSPGERLDLTSSDVRVYDNVTTFVPGTTYTVSIEYLESPDWLEVYINGSLYLRQTDFVIADVLGGGRNAYMGFTSATGSDAADIFLSSWDVDTVELAANMTTYIGSETFDKTGARVDSASGTSSASSLTLTGDGESLVGYSVQARDLCDELIEYGGAPELMQGIWIEVPQQGSDGNWSYANDAARPRLLNATILDHDDGTYSAGLATEETGEFELYFCFGESCGFEITSEIVSRTDGPTADSRRRLVSTLFEDESVGADDMVLATVALAPTAASTVFFRHVEDAVTVEPPDENAGSPSVPDGSSGDGISAKGITTVSVIGGAVGACLLLALVVLVVLRRKWQRDKHYIDEGERYNLERDVAYDKDSEYSALTKLFMASREKLMKLRAERHTSTEMQISTLVQEQRDLQSHLRTEKMRAQIAQAQTENDDSFFARRVSKRMADKRRKQFQADHDQGVPVPKPASGPVAPYHPGASYSTTSRGHRHFYGGDADDDSDDDLDV

SEQ ID NO: 46 - protein, 373 aa, Fusarium oxysporum
MSSTHPDIDSKVQKALEGTKFQVSKLEKITGGSVNWIYKAELVRPLYNAEEEVLVKHGEPYMASKPEFALPALRSTIEIESLKILSAVSSFGNQPNDTHNFVVRTPKFYHFDQDSSTQVLEFLSDGIHLKDYAIQNYGSSTPESFQPQCHELGKALGSWLRNFVAWSAQQVKHRELVAQNEFGQAVRHMLNYAWLHERTKEYPGILNDVEDILTQVEQLAASEKENTDELQIIHGDFWTGNVVLPDAAIKEGTKIPVFVVDWEMTQLGLPSVDFGEMIAEMYALWLYKSIDAGLWMMEGFIERYGHISEEFAFRTAIHVGTHLVCVTTDFPAWGRENYERVVAVGRDIIVHAWKKDREWFEEGDLACLFRSEN

SEQ ID NO: 47 - protein, 372 aa, Colletotrichum fructicola
MAAEDNTSERILRDIKAELASTPYNFNSARLLTGGTANFIYQARLNQPLPDGTSEVAIKHGEGFVRQSPDFKLTTSRCRIEESCLKCLAAFPPYINSDVSVTTPKLFYFNRDTNTQVQEYQPTPLSLKFYAIEHFSLLEPALVRAQCLEIGLGIGQWLRRFHDWSNSPAQSNLREIALANKDMQSIKHWANYQQLPNAMKRHPTVFRGCGDIFNAIVGKSTEELVDQKSLQVIHGDFWTGNILLQGVRWESRRMHLFVVDWEMFQVALTPLDLGQMIAELYQLKLYKNLDAGIWLIEGFTKGYGDVDDSFAFRTLLHVGVHLIGFGTTVPDWGDAEQVEKVAVAGREIVLGAWAKSRRWFDDHPLGCIFSSA

SEQ ID NO: 48 - protein, 395 aa, Colletotrichum spinosum
MAKKASLAPDELLEADRIDVFQCLKNTVYAAASVEPLTGGQANFTYHVRLEQALRQDRDDAASAVTDVLVKRGAPYMAKHPQNGLTTDRCDVEVACMKELELLQRQWVASNATGFITRTPKCLFYDAETKTQAHEYIPRVLDLRTYSLKLFRLQTTASLRPQCRELGKALAGYIARFHSLGVIPPGNGAESMGRSNIWSAVTRSDDMQKLKHMINYDWLLDRVDQFPEVLQDAREVFVQVKQRALDELERGSKNLTVIHGDFYPQNILLQAEPLSVGCLTPLYVVDWENAQLGLPAMDHGGMMGEMYVLWLCHGIEAGLWMMQGYAKGLATLPEETKWRVAVQIGVHILSFWTFGREGPVGEFARQGRDIVANSWRKNRAWFETSELSCLFLGTS

SEQ ID NO: 49 - protein, 354 aa, Lachnellula willkommii; identical to SEQ ID NO: 11

SEQ ID NO: 50 - protein, 391 aa, Colletotrichum sidae; identical to SEQ ID NO: 12

SEQ ID NO: 51 - protein, 380 aa, Fusarium oxysporum
MSLHEQHSIPTDTEQDIRSKVEQVLKGTTFAVSSLRKLSGGTANFMYHATLEKPSTQDKYQNGVVIKQGEGYVALHPAFKIATSRCAIEYESLVHLAELPPKETPSCRISTPEAYYFNQDSNTQVQEYLSEALSLKDYALKYYAAPTPPTLKEQCEQLGHGLGSWLRAFHSWSQEPKQAALRETFAGNKEMQGLKNMINYQQLLQMVDRHPEILGDARDVLQGVSDLAAGELADESALYPIHGDFWTGNILLPDTPLVKGTHTPIRIVDWEMVQIGVRPLDLGQVIAELWQLKLYKDIAAGEWLIRAFAGAYGAVSDDFAYRTVIHVGVHLICFGSQTPGWGDAEQQKDVVRIGKEIIVRAWSRDRGYFVGHVLDSLFRN

SEQ ID NO: 52 - protein, 364 aa, Lachnellula cervina
MATTSSKDEMLEKVQESLSLGPHACASLTQLSGGTANFVYRGTLIQPLQDGTTTIVIKHTEPYVASNPNFKLTSTRCDFEQAILSGLEQLSPISHSGITVKTPKLYTFSTETHTQIYSDLPSSTELKTYALTHSLTQAQCSRLGHALGLWAKTFHEWGAADQQQSLRKVMIGNVAMRELKYAINYPRLVATIEDFPNVLQASKEVLEAVAKDVRAWLDREEGSLIHGDFWSGNVLLRNAPFPTPEEPWEVFIIDWELSHLSTPAFDLGQMIAELFELKHFKDIDAGIWTIEAFMKGYGRLDDETAFRTGIHIGAHLICWGSRVQGWGTHEQVEAVVEVGRDFVVKGWEKDRDYFEETPLRYLFA

SEQ ID NO: 53 - protein, 380 aa, Fusarium oxysporum
MGEQDLLQQLKDTPFACSSLTRLSGGSANYVYRGILLDVIPTGDEFWNVKSVIVKYSLGHIPGNAVFKLDLSRCSVENIVLEYMSQPSLLTMKVKVPVTYFLDRNAHRGIAIQQDFRHSTDIASIIRSAELSNLWMRSKALPTSQEVGHWLRCFHEWASEPQQVDFRSKIGRNVPMQRLKHKVTYGTFIDTLKNFPDILQKNIGVLEKVKERAELELLDLASCNEGPDQGMIHGDCWMGNVLLSKSSPAPIGSDTATDIIFIDWEMCQFGHRAYDLGHMIGDLYEAYHFHSSDIALTMIRGFMDGYGEINDDMAFRTAIHAGVQFLGWYNRRAPSDSVKGTGEQISSAAKISTNLIVNGWERERQWYQSTPLAPLFQTGA

SEQ ID NO: 54 - protein, 391 aa, Fusarium oxysporum
MAAQDTSDQIRQQVSAWLNTTPYAASLLEPLAGGQANFTYRAHLINPLNDGTAEVVVKHGEPYMARHPANAVTVNRCDVEGEILSELSTNPINVAQSGSITYTVRTTTSHAYDAETKTLVLEYLPNVVDLRTYSLNQFPFPTPECLRKPAHELGKVLAIYMVKFHDMAREIVQNSLKQKHTQQLSGFNRVIDSSNDMQRLKHWINFDWMIDRVDQFPGILLEAKDTLHLVKNMALKELSDPSADVTLIHGDYHPQNILLEDARLEPATTRTLYVIDWENSQVGVSSLDHGGMLGEMYVLWKYKHIDAGLWMLQGYAEGLGPQTEDAAWRVALQVGVHLLSFGTLESGWGTTEEVEDMARLARDVIVKAWTRDRSWFDKSDFACLFAGTSQD

SEQ ID NO: 55 - protein, 376 aa, Colletotrichum orbiculare
MASLAPDELLEENRIDIFQCLKNTVYAAASIEPLAGGQANFTYHARLEQALRQDRDDAASAVTDVLVKRGAPYMAKHPQNGLTTDRCDVEVACMKELELLQRQWVASNATGFIIRTPKCLFYDVETKTQVHELQTTASLRPQCREMGKALAGYIARFHSLGAIPPGNGADSMGRSNIWSVVTRSNDMQKLKHMINYEWLLDRVDQSPGVLQDAREVFVQVKQHALEELEGSSKNLTVIHGDFYPQNILLQAEPLSVGCLTPLYVVDWENAQLGLPAMDHGGMMGEMYVLWLCHGIEAGLWMMQGYAKGLATLLPEETKWRVAVQIGVHILSFWTFGREGPVGEFARQGRDIVANAWGKNRAWFETSELSCLFPSTS

SEQ ID NO: 56 - protein, 325 aa, Colletotrichum shisoi
MAGETISDRILREVKAELADTPFHFESGRLLSGGTANFIYNVKLVHPLADGTTEVAVKHGEDFLAQNPDFKLPKSRCRIEESCLKYLSALPPTVGNKTSVATPKMLYFNECLDVGESVGKWLRGFHEWSNSTKQRKFREIAAANKEMQKIKHWVNYERLPSSIERFPSILGNCANTFKAIVEKTTREMEKDEDLQVIHGDFWTGNILLKCQPWDSERNRLLVVDWEMCMLAVIPLDLGQMIAELYELNLYKDMDAGPWMIQGFLKGYGVVDDDFAFRTLLHVGVHLIGFGTTVQDWGTEQQIKGVASEGRDLVMNSWEKNREFFE

SEQ ID NO: 57 - protein, 379 aa, Colletotrichum trifolii; identical to SEQ ID NO: 10

SEQ ID NO: 58 - protein, 360 aa, Gymnopilus dilepis
MTFDLKTEEGLLVYLTQHLSLDVDLDGLKRLSGGFVNITWRIRLNAPFKGYTNIILKHAQPHLSSDENFKIGVERSAYEYRALKIVSESPILSGDDNLVFVPQSLHYDVVHNALIVQDVGSLKTLMDYVTARPSLSSEMAKLVGGQIGAFIARLHNIGRENKDHPEFNFFSGNIVGRTTAVQLYETIVPNATKYDIDDPIIPVVVQELIEEVKGSDETLIMADLWGGNILLEFGKDSSDLGKIWVVDWELCKYGPPSLDMGYFLGDCFLLAQFQDEKVATAMRRAYLENYAKIAKVPMDYDRSTTGIGAHLVMWTDFMNWGSDEERKTSVEKGVRAFHDAKRDNKEGEIPSILLRESSRT

SEQ ID NO: 59 - protein, 362 aa, Panaeolus cyanescens
MAFDLKTVEGLIVYLTKCLSLEVDSSGVKRLSGGFVNVTWRIRLNAPYQGHTSIILKHAQPHMSTDKDFKIGVERSVYEYQALKVISANREALGGIDSRVSAPEGLHYDVENNALIMQDVGTLKTLMDYVIEKPAISTEMARLIGTEIGDFVARLHSIGRQKRDQPDFKFFSGNIVGRTTADQLYQTILPNTAKYGIDDPLLPTVVKDLVDEAMQSEETLIMADLWTGNILVEFEEGNLSVLKKIWLVDWELCKYGPVRLDMGYFLGDCFLISRFKNEQVAKAMRQAFLQRYNRVSDTPINYSVATTGIAAHIVMWTDFMNWGTEEERKEYVKKGVAGIHDGRNHNVDGEITSILMQEASTA

SEQ ID NO: 60 - protein, 264 aa, Mus musculus
MEGKVYIGGEDYEKEFTPKDYLTTYYSFHSGPVAEQEIVKFSLQNLYQTFSTGGVGGDVLIDIGSGPTIYQLLSACEVFREIIVTDYTPQNLQELQKWLKKEPGAYDWSSIVQHACELEGDRSRWQEKEAKLRRTVTRVLRCDVTKTPPLGSAQVPLADCVLTFLAMECACPDIDTYRAALRRLAGLLKPGGHLVTLVTLRFQHYMVGPKKFSGVYLEKEVVEKAIQDAGCQVLKCNCVSLSYSEAYCSHDGLCFVVARKGPSA

SEQ ID NO: 61 - protein, 263 aa, Oryctolagus cuniculus
MEGGFTGGDEYQKHFLPRDYLNTYYSFQSGPSPEAEMLKFNLECLHKTFGPGGLQGDTLIDIGSGPTIYQVLAACESFKDITLSDFTDRNREELAKWLKKEPGAYDWTPALKFACELEGNSGRWQEKAEKLRATVKRVLKCDANLSNPLTPVVLPPADCVLTLLAMECACCSLDAYRAALRNLASLLKPGGHLVTTVTLQLSSYMVGEREFSCVALEKEEVEQAVLDAGFDIEQLLYSPQSYSASTAPNRGVCFLVARKKPGS

SEQ ID NO: 62 - protein, 263 aa, Pongo abelii
MEGGFTGGDEYQKHFLPRDYLATYYSFDGSPSPEAEMLKFNLECLHKTFGPGGLQGDTLIDIGSGPTIYQVLAACESFQDITLSDFTDRNREELEKWLKKEPGAYDWTPVVKFACELEGNSGQWEEKEEKLRATVKRVLKCDVHLGNPLAPAVLPPADCVLTLLAMECACCSLDAYCAALCNLASLLKPGGHLVTTVTLRLSSYMVGKREFSCVALEKEEVEQAVLDAGFDIEQLLQSPQSYSVTNAANNGVCFIVARKKPGP

SEQ ID NO: 63 - protein, 264 aa, Rattus norvegicus
MAGKVYMGGEDYEKEFTPKDYLTTFYSFDSGTVAEQEIVKFSLQNLYQTFSTGGVGGDVLIDIGSGPTIYQLLSACEVFREIIATDYTPQNLQELQKWLKKEPGAYDWSSIVQHVCELEGDRSRWQEKEAKLRRTVTRVLRCDVTKTPPLGSAQVPLADCVLTFLAMECACPDVDTYRAALRRLAGLLKPGGHLVTLVTLRFQHYMVGPKKFSGVYLEKETVEKAIQDAGFQVLRCNCVSLSYSEAYCVNDGLYFVVARKGPSA

SEQ ID NO: 64 - protein, 262 aa, Sus scrofa
MEGKLYRGEDYKEFDSQDYLKTYYTFDSGTVAENEILKFNLKNLFQTFSSGGVGGDILIDIGTGPTIYQLLSACEVFREIIVSDYTDQNLREVEKWLKEEPGAYDWSPAVQYVCELEGDRSRWQEKEARLRRTVTRLLKCDVTEPHPLGPAQVLPADCVLTLLALECACHDVDTYRAAIRNLVSLLKPGGYLVTAVTLGFQGYIVGNKNFFGLHLEKETVEKALQDAGCQVLRCQHSPISYTETFCISKGMCFAVARKSPSA

SEQ ID NO: 65 - protein, 263 aa, Bos taurus
MEGELYKGEDYKTEFQPQNYLKTYYAFDSGTIAENEVLKFNLNNLFETFSPGGMGGDILIDIGSGPTIYQLLSACEVFREIIMSDYTELNLREVDKWLKKELGAYDWSPAVQYVCELEGDRSKWQEKEARVRRTVKRLLTCDVNQPRPLGSAQVPAADCVLSLLALECACRDVDAYRAAIQNLVGLLKPGGHLVTLVALRCCEYMVGSRKFFVLSLEQETVEKALQEAGCQVLKCQYSPIKYSEAFCLNEGFCFVVARKGPGA

SEQ ID NO: 66 - protein, 263 aa, Pan troglodytes
MKGGFTGGDEYQKHFLPRDYLATYYSFDGSPSPEAEMLKFNLECLHKTFGPGGLQGDTLIDIGSGPTIYQVLAACDSFQDITLSDFTDRNREELEKWLKKEPGAYDWTPAVKFACELEGNSGRWEEKEEKLRAAVKRVLKCDVHLGNPLAPAVLPPADCVLTLLAMECACCSLDAYRAALCNLASLLKPGGHLVTTVTLRLSSYMVGKREFSCVALEKEEVEQAVLDAGFDIEQLLHSPQSYSVTNAANNGVCFIVARKKPGP

SEQ ID NO: 67 - protein, 263 aa, Gorilla gorilla
MKGGFTGGDEYQKHFLPRDYLATYYSFDGSPSPEAEMLKFNLECLHKTFGPGGLQGDTLIDIGSGPTIYQVLAACDSFQDITLSDFTDRNREELEKWLKKEPGAYDWTPAVKFACELEGNSGRWEEKEEKLRAVVKRVLKCDVHLGNPLAPAVLPPADCVLTLLAMECACCSLDAYRAALCNLASLLKPGGHLVTTVTLRLSSYMVGKREFSCVALEKEEVEQAVLDAGFDIKQLLHSPQSYSVTNAANNGVCFIVARKKPGP

SEQ ID NO: 68 - protein, 263 aa, Nomascus leucogenys
MEGGFTGDDEYQKHFLPRDYLATYYSFDGSPSPEAEMLKFNLECLHKTFGPGGLQGDTLIDIGSGPTIYQVLAACESFQDITLSDFTDRNREELEKWLKKEPGAYDWTPVVKFSCELEGNSNRWEEKEEKLRASVKRVLKCDVHLGNPLAPAVLPPTDCVLTLLAMECACCSLDAYRAALCNLASPLKPGGHLVTTVTLRLSSYMVGKHEFSCVALEKEEVEQAVLDAGFDIEQLLHSPQSYSVTNAANTGVCFIVARKKPGP

SEQ ID NO: 69 - protein, 293 aa, Bos indicus x Bos taurus
MKLPIGRAWEERVDKMGNRSRGEAERSTARMEGELYKGEDYKTEFQPQNYLKTYYAFDSGTIAENEVLKFNLNNLFETFSPGGMGGDILIDIGSGPTIYQLLSACEVFREIIMSDYTELNLREVDKWLKKELGAYDWSPAVQYVCELEGDRSKWQEKEARVRRTVKRLLTCDVNQPRPLGSAQVPAADCVLSLLALECACRDVDAYRAAIQNLVGLLKPGGHLVTLVALRCCEYMVGSRKFFVLSLEQETVEKALQEAGCQVLKCQYSPIKYSEAFCLNEGFCFVVARKGPGA

SEQ ID NO: 70 - protein, 263 aa, Otolemur garnettii
MEDSFTGGDEYQNHFLPQDYLATYYNFNAGPSPEFDMLKFNLECLHKTFGPGGLQGDTLIDIGSGPTIYQVLAACESFRDITLSDYTDRNRQELEKWLRKEPGAYDWSPAVKFACELEGNSSRWQEKEEKLRAVVKRVLKCNVLLGNPLAPAVLPPADCVVTLLAMECACCSLSVYRTALCNLASLLKPGGHLVTTVTLGISSYMVGKREFSSLVLEKEEVEQAVLDAGFDIQQLLHSSRRYSAFNAPSSGVCFIVASKRPGP

SEQ ID NO: 71 - protein, 263 aa, Ictidomys tridecemlineatus
MEGSFTGGDVYQKHFLPRDYLATYYSFEDGPSPETEMIKFNLECLHKTFGPGGLRGDTLIDIGSGPTIYQVLAACEAFADITLSDFTDRNREELEKWLRKEPGAHDWTSVLKFACELEGNSGRWQEKAEKLRARVKRVLKCDANLSNPLAPVVLPPADCVLTLLAMECACCSLDAYRAALRNLASLLKPGGHLVTTVTLNISSYVVGKFKFSCVSMKKEEVEQAVLDAGFDIERLLHSPHNYSTTTAPNNGMCFIVARKRSGP

SEQ ID NO: 72 - protein, 242 aa, Sus scrofa
MSPATADPGTVAENEILKFNLKNLFQTFSSGGVGGDILIDIGTGPTIYQLLSACEVFREIIVSDYTDQNLREVEKWLKEEPGAYDWSPAVQYVCELEGDRSRWQEKEARLRRTVTRLLKCDVTEPHPLGPAQVLPADCVLTLLALECACHDVDTYRAAIRNLVSLLKPGGYLVTAVTLGFQGYIVGNKNFFGLHLEKETVEKALQDAGCQVLRCQHSPISYTETFCISKGMCFAVARKSPSA

SEQ ID NO: 73 - protein, 261 aa, Xenopus laevis
MSCSEHKDYHDEEFDPCHLFDMYAGSDKTISKEELVENPIKFLYNLLSSGSVKGELLIGLTIGSAVWESFVAADFFKNIILLESSDCCIKALENWIRNEPGAVEQAHVLEFVCSLKGQSTEWKKQEEKTRRAIKQLVKWDITKENPLGTVVLPQADCLFTIYYLEVISKDQDMYINLLKKFVSLLKIGGHLILVAAINMSYYTVGQHKFAALKCNEEFIRKALAKVGCTIVSSETHKGKFKSSLTDYESIAYFVSRKDRVE

SEQ ID NO: 74 - protein, 259 aa, Chlorocebus sabaeus
FTGGDEYQKHFLPRDYLATYYSFDGSPSPEAEILKFNLECLHKTFGPGGLQGDTLIDIGSGPTIYQVLAACESFRDITLSDFTDRNREELEKWLKKEPGAYDWTPVVKFACELEGNSGHWEEKEEKLRAAVKRVLKCDVHLGNPLAPAVLPPTDCVLTLLAMECACCSLDAYRTALCNLASLLKPCGHLVTTVTLQISSYMVGKREFSCVALEKEEVEQAVLDAGFDIEQLLQNPQSYSVTNAASSGVCFIVARKKPRP

SEQ ID NO: 75 - protein, 266 aa, Xenopus tropicalis
MDTKFTGKDIYQEEFDPWGYLDTYYNLKSGVLVTDGFLDFALRKLHETFTVHGVKGETLIDIGHGPTIYQDLSACESFKEIIGADYADRSREYFEKTVRNEPGIFDWTSVIQAVCDLEGKGTTVEEKREKLKKTVKKSIKCDVTKSNPVAPLVLPKVDCVMSLGCLECASKDLDSYRNVLKNISPLLKVGGYLILSEILNCTSYLSGGKRFSCLSLNEEFMRSAITDTGFAIIDLEVIPRKYDKEQYNICNHDSSLFVLARKLRDI

SEQ ID NO: 76 - protein, 270 aa, Xenopus tropicalis
ETSNTYTKFTGKDIYQEEFDPWGYLDTYYNLKSGVLVTDGFLDFALRKLHETFTVHGVKGETLIDIGHGPTIYQDLSACESFKEIIGADYADRSREYFEKTVRNEPGIFDWTTVIQAVCDLEGKGTTVEEKREKLKKTVKKSIKCDVTKSNPVAPLVLPKVDCVMSLGCLECASKDLDSYRNVLKNISPLLKVGGYLIISEILNCTSYLSGGKRFSCLSLNEEFMRSAITDTGFAIIDLEVIPRKYDKEQYNICNHDSSLFVLARKLRDI

SEQ ID NO: 77 - protein, 263 aa, Heterocephalus glaber
MEGSFTGPDKYQKYFLPKDYLDTYYRFEHGPSPETEMIKFNLQCLHKTFGPGGLRGETLIDVGSGPTIYQVLAACEAFSDITLSDFTDRNREELQKWLRKDVGAFDWTPVLKFACELEGNSSRWQEKAEKLRATVKRVLKCDVNLGNPLVPVELPPADCVVTLLAMECACCNLAAYRAALCNLSSLLKPGGHLVTTVTLEISSYMVGKHQFSCLAMTKEEVEQAVQDAGFDIKQLLHSAQAYSASVAPNKGICFIVARKRPGP

SEQ ID NO: 78 - protein, 262 aa, Cricetulus griseus
MEGKVYKGGEDYEQEFDPRDYLATYYNFDSGPVAEKEIIKFSLQNLYQTFSSGSVRGDLLIDIGSGPTIYQLLSACEAFREIIVSDYTPQNLQELQKWLKKEPGAYDWSSIVQHVCELEGDRSKWQEKEAKLRRTVTRVLKCDVTKTPALGSAQVPLADCVLTFLAMECACLDVDTYRAALRRLADLLKPGGHLVTMVTLGFQNYMVGPKKFSGVFLEKETVEKAVQDAGCQVLKCNCAPLKYSQACCKGLCFIVARKGSSA

SEQ ID NO: 79 - protein, 263 aa, Macaca mulatta
MEGGFTGGDEYQKHFLPRDYLATYYSFDGSPSPEAEILKFNLECLHKTFGPGGLQGDTLIDIGSGPTIYQVLAACESFRDITLSDFTDRNREELEKWLKKEPGAYDWTPVVKFACELEGNSGRWEEKEEKLRAAVKRVLKCDVHLGNPLAPAVLPPADCVLTLLAMECACCSLDAYRTALCNLASLLKPCGHLVTTVTLQISSYMVGKREFSCVALEKEEVEQAVLDAGFDIEQLLQNPQSYSVTNAASSGVCFIVARKKPRP

SEQ ID NO: 80 - protein, 293 aa, Bos indicus
  misc_feature (186)..(186): Xaa can be any naturally occurring amino acid
MKLPIGRAWEERVDKMGNRSRGEAERSTARMEGELYKGEDYKTEFQPQNYLKTYYAFDSGTIAENEVLKFNLNNLFETFSPGGMGGDILIDIGSGPTIYQLLSACEVFREIIMSDYTELNLREVDKWLKKELGAYDWSPAVQYVCELEGDRSKWQEKEARVRRTVKRLLTCDVNQPRPLGSAQVPXADCVLSLLALECACRDVDAYRAAIQNLVGLLKPGGHLVTLVALRCCEYMVGSRKFFVLSLEQETVEKALQEAGCQVLKCQYSPIKYSEAFCLNEGFCFVVARKGPGA

SEQ ID NO: 81 - protein, 262 aa, Mesocricetus auratus
  misc_feature (58)..(58): Xaa can be any naturally occurring amino acid
MEGKVYKGGEDYEQEFDPRDYLTTYYNFDSGPVAEKEIIKFSLQNLFQTFSAGGVRGXVLIDIGSGPTIYQLLSACEAFREIIVTDYTPQNLQELQKWLKKEPGAYDWSSIVQHVCELEGDRSRWQEKEAKLRRTVTRVLKCDVTKSPALGSAQVPLADCVLTFLAMECACLDVDTYRAALRRLADLLKPGGHLVTMVTLGFQSYMVGPKKFSGVCLEKETVEKAVQDAGCQVLKCNCAPLKYSQACCEGLCFIVARKGSGA

SEQ ID NO: 82 - protein, 263 aa, Octodon degus
MERNFTGPDEYQKHFMPKDYLATYYSFECGSSSETEMVKFNLQCLHQTFGPGGLRGKTLIDVGSGPTIYQVLAACEAFSDITLSDFTDRNREELQKWLSKDPGAFDWTLVLKFACELEGNSSRWQEKAEKLRATVKRVLKCDVNMSNPLAPVELPPMDCVLTLLAMECACSSLAAYRAALCNLASLLKPGGHLVTSITLQLSHYMVGKREFSCVSLTKEEVEQAILDAGLDIEQLLHSAQSYSTTTAPNKGICFIVARKRLGP

SEQ ID NO: 83 - protein, 293 aa, Bison bison
MKLPIGRAWEERVDKMGNRSRGEAERSTARMEGELYKGEDYKTEFQPQNYLKTYYAFDSGTIAENEVLKFNLNNLFETFSPGGMGGDILIDIGSGPTIYQLLSACEVFREIIMSDYTELNLREVDKWLKKEPGAYDWSPAVQYVCELEGDRSKWQEKEARVRRTVKRLLTCDVNQPRPLGSAQVPAADCVLSLLALECACRDVDAYRAAIQNLVGLLKPGGHLVTLVALRCCEYMVGSRKFFVLSLEQETVEKALQEAGCQVLKCQYSPIKYSEAFCLNEGICFVVARKGPGA

SEQ ID NO: 84 - protein, 263 aa, Chrysochloris asiatica
MEGSFTGGEEYQKYFQPRDYLTTYYNFDGSPTPEAEMLKFNLECLHKTFGPGGLRGDTLIDIGSGPTIYQVLAACESFRDITLSDFTDRNREELEKWLKKEPEAYDWSSVVKFACELEGDSGRWQEKEKKLRSVVKRVLKCDANLASPLAPAALPPADCVLTLLAMECACCSLDAYRAALCNLASLLKPGGHLVTTVTLGISSYMVGKREFSCVVLEKEGVEQAVLDAGFDIQQFLHIPKCYSATIAANNGVCFIVARKKPAP

SEQ ID NO: 85 - protein, 263 aa, Delphinapterus leucas
  misc_feature (206)..(206): Xaa can be any naturally occurring amino acid
MEGKLYTGEDYKKEFDSQNYLKTYYTFDSGTVAENEILKFNLKNLFETFSSAGVRGDVLSNTGPGPTVYQLLSACEAFREIIASDHLQQNPQEVKKWLKKEPGAYDWSPAMQQVCELEGDRSKWQEKEARLQRTVTRLLKWDANQPHPLGPAQVPPVDCVLTLLALECACHDVDAYRAAGRGLVSLLKPGGHLVTAVALRTQHYMXGAKKFFGLHLEKETVEKALQEAGCQVLRCRYSPVSYSEAHCINEGICFVVARKSPGA

SEQ ID NO: 86 - protein, 286 aa, Mus caroli
MVGRSEHSVGAKESRQLCGLARMEGKVYIGGEDYEKEFTPKDYLTTYYNFHSGPVAEQEILKFSLQNLYQTFSTGGVGGDVLIDIGSGPTIYQLLSACEVFREIIVTDYTPQNLQELQKWLKKEPGAYDWSSIVQYACELEGDRSRWQEKEAKLRKTVTRVLKCDVTKTPPMGSAQVPLADCVLTFLAMECACSDVDTYRAALRRLAGLLKPGGHLVTLVTLRFQHYMVGPKKFSGVYLEKEMVEKAIQDAGCQVLKCNCVSLSYSEAYCSHDGLCFVVARKGPSA

SEQ ID NO: 87 - protein, 234 aa, Odocoileus virginianus texanus
MEGKVYTGEDYKTKFNPRDYLKTYYAFDSGTVAENEILKFLLNNLFETFSPGGVGGDILIDIGTGPTIYQLLSACEAFREIIVSDYSELNLREVDKWLKKEPGAYDWSPAVQYVCELKGDRSKWQEKEARLQRTVTQLLTCDVNQPRPLGSAQVPAVDCVLTLLALECACHNVDAYRAAIRSLVGLLKPGRHLVTSVALNCQNYMVGPSSLWHVGECWPSTTQAWLTCEALNAL

SEQ ID NO: 88 - protein, 263 aa, Odocoileus virginianus texanus
MEGKVYTGEDYKTKFNPRDYLKTYYAFDSGTVAENEILKFLLNNLFETFSPGGVGGDILIDIGTGPTIYQLLSACEAFREIIVSDYSELNLREVDKWLKKEPGAYDWSPAVQYVCELKGDRSKWQEKEARLQRTVTQLLTCDVNQPRPLGSAQVPAVDCVLTLLALECACHNVDAYRAAIRSLVGLLKPGRHLVTSVALNCQNYMVGPSKFFGLPLEKETVEKALQEAGCQVLKSQYSPINYSEAYCINESHYFVVTRKDPGA

SEQ ID NO: 89 - protein, 262 aa, Octodon degus
MERNFTGPDEYQKHFMPKDYLATYYSFECGSSSETEMVKFNLQCLHQTFGPGGLRGKTLIDVGSGPTIYQVLAACEAFSDITLSDFTDRNREELQKWLSKDPGAFDWTLVLKFACELEGNSRWQEKAEKLRATVKRVLKCDVNMSNPLAPVELPPMDCVLTLLAMECACSSLAAYRAALCNLASLLKPGGHLVTSITLQLSHYMVGKREFSCVSLTKEEVEQAILDAGLDIEQLLHSAQSYSTTTAPNKGICFIVARKRLGP

SEQ ID NO: 90 - protein, 266 aa, Lithobates catesbeianus
METDFTDKDTYQDIFDPHAYCNIYYGPKSGLLVVDGFLDFALKKLCETFTVRGIKGKTLIDIGHGPTTFQDLSACEAFEEIIGADYTDRNREYYERSLRDEPGTFGWTEAIQKVCDMEGKGMTVEEKKKKLQATVKKTIKCDVLKSNPMEPLVLPKVDCVLTFGCLECACSDLDTYRRVLKNVSTLIKIGGHLIVSEILNCSSYLLGGKRFSCLVLTKEFMRSAIIETGFTIVDLEVIPRKYDKEQYELCNHNSSLFVLARKERDV

SEQ ID NO: 91 - protein, 303 aa, Odocoileus virginianus texanus
MEGKVYTGEDYKTKFNPRDYLKTYYAFDSGTVAENEILKFLLNNLFETFSPGGVGGDILIDIGTGPTIYQLLSACEAFREIIVSDYSELNLREVDKWLKKEPGAYDWSPAVQYVCELKGDSSQRGQLSVPGENSHGVSCPPLSSLPSKPVPERGHPSLRKVSISTPLDSGSRMGIPGNLLEIQMLKSQPRPTGAELHFNKIPAKHCYRHAELKAGHGGRAGAVEGEQGSFPVVSSPALLTLTSQLKDWGSCPAMEHMFPPHPSTPTTSPVPSLHLLFCFCVPHFPPWRGHTLPCSSPSANHTV

SEQ ID NO: 92 - protein, 423 aa, Erinaceus europaeus
MGLRLHPLAEKLECRPVAGARSEKHLVRLRELRAGRLPERQLTGLLGQGSAPPGSRDPFSVTVTVTVKDRPPSLGPAALLSCGLGLSLGVRAGSRGEIWSSTTERPGSGSQQTPPLRYGWSGQKALESIHRWAQGAATFRLGTSLPLLQSSFWVPRRMGARDTVGNELPAGLRGCGHGASCLQGRGLGVLSSPGGLRGDTLIDIGSGPTIYQVLSACEAFGDITMSDFTDRNREELQKWLKKEPGAYDWTPVVKYACELEGDSDRWQEKEEKLRAVVRRVLKCDANLANPLAPAVLPPADCVLTLLAMEAACCSLDAYRTGLRNLASLLKPGGHLVTAVTLGLSSYMVGKREFSCLALGKEEVQQAVLDAGLHIQHVLHSPKSYTASSAANTGGVCFLVACKKPGPEVPGSAQAPTPPRATIG

SEQ ID NO: 93 - protein, 217 aa, Vicugna pacos
MLSPAGGVGGDILIDIGSGPTIYQLLSACEAFREIIVSDYTEQNLRELEKWLKKEPGAYDWSPAVQYVCELEGDRSRCQEKEARLRRTVTRILKCDVTQPHPLAPAQVPPADCVLTLLAMECACPDVDAYRAAIRRLVSLLKPGGHLVTAIALRCQSYMVGAKKFFALHLEKETVEKAMQEAGCQVLRCEYCPISYSEVHCTNEGTCFVVARKGPRA

SEQ ID NO: 94 - protein, 217 aa, Vicugna pacos
MLSPAGGVGGDILIDIGSGPTIYQLLSACEAFREIIVSDYTEQNLRELEKWLKKEPGAYDWSPAVQYVCELEGDRSRCQEKEARLRRTVTQLLKCDVTQPHPLAPAQVPPADCVLTLLALESACPDADAYRAAIRSLVSLLKPGGHLVTMAALRSQHYMVGAKKFFGLHLEKETVEKAMQEAGCQVLRCEYCPISYSEVHCTNEGTCFVVARKGPRA

SEQ ID NO: 95 - protein, 214 aa, Odocoileus virginianus texanus
MEGKVYTGEDYKTKFNPRDYLKTYYAFDSGTVAENEILKFLLNNLFETFSPGGVGGDILIDIGTGPTIYQLLSACEAFREIIVSDYSELNLREVDKWLKKEPGAYDWSPAVQYVCELKGDRSKWQEKEARLQRTVTQLLTCDVNQPRPLGSAQVPAVDCVLTLLALECACHNVDAYRAAIRSLVGLLKPGRHLVTSVALNCQNYMVGPTARGVS

SEQ ID NO: 96 - protein, 264 aa, Araneus ventricosus
MENDEVKIKEDYLKNLDPKKFQEFKLEGLKAEKSENNYDFWFKCLHEFFSSGNCSGTRMLEIGSGPTVHNIATASAYFPYIVQSEFVESNCEQLRKWLRKDPDSLDWTIFLQRVARAEGKEDVDAAVPEIEDRIRSAVKAVVHADVLDDQVIPKEYTQEPYDLILSVLTFETAAVNLESYSKILGRANRLLRKGGKMILISATKCTYWQVGGNKFHCLSLEEHEIEDALKKNGFGEICWKIRERPDDDLPFNCKNVYFLTCTKL

SEQ ID NO: 97 - protein, 260 aa, Lithobates catesbeianus
MDSTTHKLYHVHGMDSRGFLDTYFSNKEDMVFAEDSIKFPMAMFHYQFSSGRIEGTFLIDISLGSVIHNLYSASNSFKNIVILKFQEKCIMELNRWLHDRTGAYDWSHTSSAAAELEGTRDQLQEKEMCLRSSIRQILKCDFEQENTISPMLLPLADCIISAWILEVISKNEDEYMKNLEKIIKLLKPGGQLLLIASLDATYWFAGAGRFHCFKINEEFVKNAFGKLGLVIDYYAVQRRRNVSDIIDYKAMLFIVGRKGE

SEQ ID NO: 98 - protein, 280 aa, Microtus ochrogaster
MEDKVYKAGEDYEKEFSPRDYLDTFYNFDSGPVAEREIIKFSLQNLHQTFSVGGIRGDVLIDIGTGPTIYQLLSACEVFREIIVADYTSQNLQELQKWLKKEPGAYDWSSIVKHVCELEGDRSRWQEKEAKLRKTVTRVLKCDVTKTPPLGSAQVPLADCVLTFLAMECACLDVETYRAALRRLADLLKPGGPPGYHGYSVFPALYGGPQEVLWGLPGEGDGREGSSRCRLSGAEMQLCPPQILPGLLRRPLFYSRPQGPQCLRTLAEKSLPWGSHSQHL

SEQ ID NO: 99 - protein, 522 aa, Chondromyces crocatus
MQLPSSTKILVVGGGPAGSTAATLLAREGFEVTLVEKAIFPRYHIGESLLISVQPIIDLLGAREAVEAHGFQRKKGVLWEWGGERWLFDWKKLRYDYTFHVKREEFDEILLRNAQKNGVKVFEGIDISRLEFDGERPVAAKWSKSSTGESGTIQFEFLLDASGRAGLMATQYLRSRMFMKAFQNVATWGYWKGATIPEVEVEGPITVGSIPYGWIWGIPLRDQTMSVGLVIHQELFKEKRATQSVEEIYHEGLKASPLFQDVVLKGATLEPQIRTETDYSYISRTLAGPGFFLVGDSGAFIDPLLSSGVHLAMHSALLAAASVKSIIAGEVDMASATEFYQRCYQGHFLRWALIVASFYEVNARKETYFWTAQQLAHEELGVFNMSQADMKDVFATMVSGVVDLGDAQNAGRLQKGAERVHQYLDDDGREEDVTALLQKSKQRIFEYLDRVKNRDSRAAMQRYKAGGTETFSMGLDADGAVGGLYVTTEPRLGLLRKVVEERAEAATEAPAPAAPPPAVAEV

SEQ ID NO: 100 - protein, 511 aa, Streptomyces rugosporus
MIRSVVIVGGGTAGWMTASYLKAAFDDRIDVTLVESGNVRRIGVGEATFSTVRHFFDYLGLDEREWLPRCAGGYKLGIRFENWSEPGEYFYHPFERLRVVDGFNMAEWWLAVGDRRTSFSEACYLTHRLCEAKRAPRMLDGSLFASQVDESLGRSTLAEQRAQFPYAYHFDADEVARYLSEYAIARGVRHVVDDVQHVGQDERGWISGVHTKQHGEISGDLFVDCTGFRGLLINQTLGGRFQSFSDVLPNNRAVALRVPRENDEDMRPYTTATAMSAGWMWTIPLFKRDGNGYVYSDEFISPEEAERELRSTVAPGRDDLEANHIQMRIGRNERTWINNCVAVGLSAAFVEPLESTGIFFIQHAIEQLVKHFPGERWDPVLISAYNERMAHMVDGVKEFLVLHYKGAQREDTPYWKAAKTRAMPDGLARKLELSASHLLDEQTIYPYYHGFETYSWITMNLGLGIVPERPRPALLHMDPAPALAEFERLRREGDELIAALPSCYEYLASIQ

SEQ ID NO: 101 - protein, 523 aa, Streptomyces toxytricini
MNTRNPDKVVIVGGGTAGWMTASYLKKAFGERVSVTLVESGTIGTVGVGEATFSDIRHFFEFLDLREEEWMPACNATYKLAVRFQDWQRPGHHFYHPFEQMRSVDGFPLTDWWLQNGPTDRFDRDCFVMASLCDAGRSPRYLNGSLLQQEFDERAEEPAGLTMSEHQGKTQFPYAYHFEAALLAEFLSGYSKDRGVKHVVDEVLEVKLDDRGWISHVVTKEHGDIGGDLFVDCTGFRGVLLNQALGVPFVSYQDTLPNDSAVALQVPLDMEARGIPPYTRATAKEAGWIWTIPLIGRIGTGYVYAKDYCSPEEAERTLREFVGPEAADVEANHIRMRIGRSEQSWKNNCVAIGLSSGFVEPLESTGIFFIHHAIEQLVKHFPAGDWHPQLRAGYNSAVANVMDGVREFLVLHYLGAARNDTRYWKDTKTRAVPDALAERIERWKVQLPDSENVFPYYHGLPPYSYMAILLGTGAIGLRPSPALALADPAAAEKEFTAIRDRARFLVDTLPSQYEYFAAMGQRV

SEQ ID NO: 102 - protein, 531 aa, Streptomyces albogriseolus
MDNRIKTVVILGGGTAGWMTAAYLGKALQNTVKIVVLEAPTIPRIGVGEATVPNLQRAFFDYLGIPEEEWMRECNASYKMAVKFINWRTPGEGSPDPRTLDDGHTDTFHHPFGLLPSADQIPLSHYWAAKRLQGETDENFDEACFADTAIMNAKKAPRFLDMRRATNYAWHFDASKVAAFLRNFAVTKQAVEHVEDEMTEVLTDERGFITALRTKSGRILQGDLFVDCSGFRGLLINKAMEEPFIDMSDHLLCNSAVATAVPHDDEKNGVEPYTSSIAMEAGWTWKIPMLGRFGSGHVYSDHFATQDEATLAFSKLWGLDPDNTEFNHVRFRVGRNRRAWVRNCVSVGLASCFVEPLESSGIYFIYAAIHMLAKHFPDKTFDKVLVDRFNREIEEMFDDTRDFLQAHYYFSPRVDTPFWRANKELKLADSIKDKVETYRAGLPVNLPVTDEGTYYGNFEAEFRNFWTNGSYYCIFAGLGLMPRNPLPALAYKPQSIAEAELLFADVKRKGDTLVESLPSTYDLLRQLHGAS

SEQ ID NO: 103 - protein, 505 aa, Kutzneria sp.
MTAAYLKTAFGDRLSITVVESSRIGTIGVGEATFSDIQHFFQFLNLREQDWMPACNATYKLGIRFENWRHVGHHFYQPFEQIRPVYGFPLTDWWLHDAPTDRFDTDCFVMPNLCEAGRSPRHLDGTLADEDFVEEGDELANRTMSEHQGKSQFPYAYHFEAALLAKFLTGYAVDRGVEHVVDDVLDVRLDQRGWIEHVVTAEHGEIHGDLFVDCTGFRGLLLNKALGVPFVSYQDTLPNDSAVALQVPLDMQRRGIVPNTTATAREAGWIWTIPLFGRVGTGYVYAKDYLSPEEAERTLREFVGPAAADVEANHIRMRIGRSQESWRNNCVAIGLSSGFVEPLESTGIFFIHHAIEQLVKHFPAADWNPKSRDMYNSAVAHVMDGIREFLVIHYRGAARADNQYWRDTKTRPLPDGLAERIECWQTQLPDTETIYPYYHGLPPYSYMCILMGGGAIRTPASAALALTDQGAAQKEFAAVRDRAAQLRDTLPSHYEYLARMRGLDV

SEQ ID NO: 104 - protein, 530 aa, Lechenvalieria aerocolonigenes
MSGKIDKILIVGGGTAGWMAASYLGKALQGTADITLLQAPDIPTLGVGEATIPNLQTAFFDFLGIPEDEWMRECNASYKVAIKFINWRTAGEGTSEARELDGGPDHFYHSFGLLKYHEQIPLSHYWFDRSYRGKTVEPFDYACYKEPVILDANRSPRRLDGSKVTNYAWHFDAHLVADFLRRFATEKLGVRHVEDRVEHVQRDANGNIESVRTATGRVFDADLFVDCSGFRGLLINKAMEEPFLDMSDHLLNDSAVATQVPHDDDANGVEPFTSAIAMKSGWTWKIPMLGRFGTGYVYSSRFATEDEAVREFCEMWHLDPETQPLNRIRFRVGRNRRAWVGNCVSIGTSSCFVEPLESTGIYFVYAALYQLVKHFPDKSLNPVLTARFNREIETMFDDTRDFIQAHFYFSPRTDTPFWRANKELRLADGMQEKIDMYRAGMAINAPASDDAQLYYGNFEEEFRNFWNNSNYYCVLAGLGLVPDAPSPRLAHMPQATESVDEVFGAVKDRQRNLLETLPSLHEFLRQQHGR

SEQ ID NO: 105 - protein, 538 aa, Pseudomonas fluorescens
MNKPIKNIVIVGGGTAGWMAASYLVRALQQQANITLIESAAIPRIGVGEATIPSLQKVFFDFLGIPEREWMPQVNGAFKAAIKFVNWRKSPDPSRDDHFYHLFGNVPNCDGVPLTHYWLRKREQGFQQPMEYACYPQPGALDGKLAPCLSDGTRQMSHAWHFDAHLVADFLKRWAVERGVNRVVDEVVDVRLNNRGYISNLLTKEGRTLEADLFIDCSGMRGLLINQALKEPFIDMSDYLLCDSAVASAVPNDDARDGVEPYTSSIAMNSGWTWKIPMLGRFGSGYVFSSHFTSRDQATADFLKLWGLSDNQPLNQIKFRVGRNKRAWVNNCVSIGLSSCFLEPLESTGIYFIYAALYQLVKHFPDTSFDPRLSDAFNAEIVHMFDDCRDFVQAHYFTTSRDDTPFWLANRHDLRLSDAIKEKVQRYKAGLPLTTTSFDDSTYYETFDYEFKNFWLNGNYYCIFAGLGMLPDRSLPLLQHRPESIEKAEAMFASIRREAERLRTSLPTNYDYLRSLRDGDAGLSRGQRGPKLAAQESL

SEQ ID NO: 106 - protein, 533 aa, Kutzneria sp.
MDDNRIRSILVLGGGTAGWMSACYLSKALGPGVEVTVLEAPSISRIRVGEATIPNLHKVFFDFLGIAEDEWMRECNASYKAAVRFVNWRTPGDGQATPRRRPDGRPDHFDHLFGQLPEHENLPLSQYWAHRRLNGLTDEPFDRSCYVQPELLDRKLSPRLMDGTKLASYAWHFDADLVADFLCRFAVQKLNVTHVQDVFTHADLDQRGHITAVNTESGRTLAADLFIDCSGFRSVLMGKVMQEPFLDMSKHLLNDRAVALMLPHDDEKVGIEPYTSSLAMRSGWSWKIPLLGRFGSGYVYSSQFTSQDEAAEELCRMWDVDPAEQTFNNVRFRVGRSRRAWVRNCVAIGVSAMFVEPLESTGLYFSYASLYQLVKHFPDKRFRPILADRFNREVATMYDDTRDFLQAHFSLSPRDDSEFWRACKELPFADGFAEKVEMYRAGLPVELPVTIDDGHYYGNFEAEFRNFWTNSNYYCIFAGLGFLPEHPLPVLEFRPEAVDRAEPVFAAVRRRTEELVATAPTMQAYLRRLHQGT

SEQ ID NO: 107 - protein, 170 aa, Lechenvalieria aerocolonigenes
MTIEFDRPGAHVTAADHRALMSLFPTGVAVITAIDEAGTPHGMTCTSLTSVTLDPPTLLVCLNRASGTLHAVRGGRFGVNLLHARGRRAAEVFSTAVQDRFGEVRWEHSDVTGMPWLAEDAHAFAGCVVRKSTVVGDHEIVLGEVHEVVREHDLPLLYGMREFAVWTPEG

SEQ ID NO: 108 - protein, 728 aa, Psilocybe cubensis
MASSSSDVFVLGLGVVLAALYIFRDQLFAASKPKVAPVSTTKPANGSANPRDFIAKMKQGKKRIVIFYGSQTGTAEEYAIRLAKEAKQKFGLASLVCDPEEYDFEKLDQLPEDSIAFFVVATYGEGEPTDNAVQLLQNLQDESFEFSSGERKLSGLKYVVFGLGNKTYEHYNLIGRTVDAQLAKMGAIRIGERGEGDDDKSMEEDYLEWKDGMWEAFATAMGVEEGQGGDSADFVVSELESHPPEKVYQGEFSARALTKTKGIHDAKNPFAAPIAVARELFQSVVDRNCVHVEFNIEGSGITYQHGDHVGLWPLNPDVEVERLLCVLGLAEKRDAVISIESLDPALAKVPFPVPTTYGAVLRHYIDISAVAGRQILGTLSKFAPTPEAEAFLRNLNTNKEEYHNVVANGCLKLGEILQIATGNDITVPPTTANTTKWPIPFDIIVSAIPRLQPRYYSISSSPKIHPNTIHATVVVLKYENVPTEPIPRKWVYGVGSNFLLNLKYAVNKEPVPYITQNGEQRVGVPEYLIAGPRGSYKTESFYKAPIHVRRSTFRLPTNPKSPVIMIGPGTGVAPFRGFVQERVALARRSIEKNGPDSLADWGRISLFYGCRRSDEDFLYKDEWPQYEAELKGKFKLHCAFSRQNYKPDGSKIYVQDLIWEDREHIADAILNGKGYVYICGEAKSMSKQVEEVLAKILGEAKGGSGPVEGVAEVKLLKERSRLMLDVWS

SEQ ID NO: 109 - protein, 317 aa, Panaeolus cyanescens
MHNRNPYRDVIDYQALAEAYPPLKPHVTVNADNTASIDLTIPEVQRQYTAALLHRDFGLTITLPEDRLCPTVPNRLNYVLWIEDIFQCTNKALGLSDDRPVKGVDIGTGASAIYPMLACARFKQWSMIATEVERKCIDTARLNVLANNLQDRLSILEVSVDGPILVPIFDTFERATSDYEFEFTMCNPPFYDGAADMQTSDAAKGFGFGVNAPHSGTVIEMATEGGEAAFVAQMVRESMKLQTRCRWFTSNLGKLKSLHEIVALLRESQITNYAINEYVQGTTRRYALAWSFTDIKLTEELYRPSNPELGPLCSTFV

SEQ ID NO: 110 - protein, 297 aa, Gymnopilus junonius
MHSRNPYRSPPDFAALSAAYPPLSPYITTDLSSGRKTIDFRNEEAQRRLTEAIMLRDFGVVLNIPSNRLCPPVPNRMNYVLWIQDIVYAHQTILGVSSRRIRGLDIGTGATAIYPILACKKEQSWEMVATELDDYSYECACDNVSSNNMQTSIKVKKASVDGPILFPVENQNFDFSMCNPPFYGSKEEVAQSAESKELPPNAVCTGAEIEMIFSQGGEEGFVGRMVEESERLQTRCKWYTSMLGKMSSVSTIVQALRARSIMNYALTEFVQGQTRRWAIAWSFSDTHLPDAVSRISS

SEQ ID NO: 111 - protein, 309 aa, Gymnopilus dilepis
MHIRNPYLTPPDYEALAEAFPALKPYVTVNPDKTTTIDFAIPEAQRLYTAALLYRDFGLTITLPPDRLCPTVPNRLNYVLWIQDILQITSAALGLPEARQVKGVDIGTGAAAIYPILGCSLAKNWSMVGTEVEQKCIDIARQNVISNGLQDRITITANTIDAPILLPLFEGDSNFEWEFTMCNPPFYDGAADMETSQDAKGFGFGVNAPHTGTVVEMATDGGEAAFVSQMVRESLHLKTRCRWFTSNLGKLKSLHEIVGLLREHQITNYAINEYVQGTTRRYAIAWSFTDLRLSDHLPRPPNPDLSALF

SEQ ID NO: 112 - protein, 312 aa, Psilocybe cyanescens
MHIRNPYRSPIDYQALVEAFPPLRPYVTVNQDNTTSIDLTVPEVQRLYTAALLHRDFGLVIDLPEDRLCPTLLTRTPRLNYVLWVEDILKVTNTALGLSEDRPVKGIDIGTGAAAIYPMLACARFKTWSMIGTEIDRKCIDTARVNVLTNNLQDRLSIIETSIDGPILVPIFEATTDYEYDFTMCNPPFYDGAADMQTSDAAKGFGFGVNAPHSGTVIEMSTEGGESAFVAQMVRESLDHRTRCRWFTSNLGKLKSLHEIVGLLREHQISNYAINEYVQGTTRRYAIAWSFTNIRLPEDLTRPSNPELSSLF

SEQ ID NO: 113 - protein, 317 aa, Panaeolus cyanescens; identical to SEQ ID NO: 109

SEQ ID NO: 114 - protein, 429 aa, Dichomitus squalens
MHARNPYREPPDFQALADAYPPLQQHIIATANGSSIDFKDEASQRRLTEAILHRDFGLTLELPPNRLCPPVPNRLNYILWLEDIVEASSLAIRPDDRVHPVRGLDIGTGASAIYPLLGCSLHPNWTFAGTDVDETSLEYARYNVRANGLQDRISVVRADKEGPMLLPMFQSHVNYDFVMCNPPFYSSREDVAQSAAAKELGPNAVCTGADVEMITDGGETAFVGRMVEESLALKDRCRWYTSMLGKMSSLKHIVQTLRDSKVDNYAVAELVQGQTRRWIIAWSFEDVRLPDSLARLSHPGLQNIMPARNTLKQRLPPTADDAQLPVTVSDIICSVEGLVVDHGAAEAPVLDLIVSASGDVWSRAARRKRQKEMQVEEVAAIEVRMTCRIRIEAGCLVFDWVKGRERGVFESFASHIERKVASAMTHDMH

SEQ ID NO: 115 - protein, 429 aa, Dichomitus squalens
MHARNPYREPPDFQALADAYPPLQQHIIATANGSSIDFKDEASQRRLTEAILHRDFGLTLELPPNRLCPPVPNRLNYILWLEDIVEASSLAIRPDDRVHPVRGLDIGTGASAIYPLLGCSLHPNWTFAGIDVDETSLEYARYNVRANGLQDRISVVRADKEGPMLLPMFQSRWNYDFVMCNPPFYSSREDVAQSAAAKELGPNAVCTGADVEMITDGGETAFVGRMVEESLALKDRCRWYTSMLGKMSSLKHIVQTLRDSKVDNYAVAELVQGQTRRWIIAWSFEDVRLPDSLARLSHPGLQNIMPARNTLKQRLPPTADDAQLPVTVSDIICSVEGLVVDHGAAEAPVLDLIVSASGDVWSRAARRKRQKEMQVEEVAAIEVRMTCRIRLGAGCLVFDWVKGRERSLFESFASHIERKVASAMTHDMH

SEQ ID NO: 116 - protein, 436 aa, Polyporus arcularius
MHPRNPYRTPPDFLALAEAYPALKPHLISASHGTTVDFKDETAQRRLTEAILHRDFGLKMDLPPGRLCPPVPNRLNYILWLDDVVEAMGLAEHPVERARRVVRGLDVGTGASAIYPLLGCSTHSNWTFTATEIDFLSIEYARRNVVQNGLEERISVVQADPDGSILAPLAQSDVPYDFTMCNPPFYGSREEVIQSAESKEFEPNAVCTGADVEMITAGGEAAFVGKMVRESLRLRDKCRWFTSMLGKMSSLTHIVHLLREHAVSNYAITELVQGQTRRWVVAWSYGDVRLPDSIGRLSHHALQTILPPRNTLVQPLAQATSQAQVAPVLATVLASVDGLTVRPLSTESGPADVLVMVTENTWSRAARRKKRDAMPVETDSGPRAEVQLICRVKLAGSVEEGNRVTMAFDWVAGKDRGLFESFASHVERKVVGTFKT

SEQ ID NO: 117 - protein, 448 aa, Fomitopsis pinicola
MHPRNPYRSAPEFRSLADAYPPLQPYLLNTRNGASIDFQDEAAQSRRLTEAILLRDFKLTIDIPEDRLCPPVPNRLNYILWLQDVLDVTCLTEHLVADRTIRGVDVGTGASAIYPLLGCRSDPRWVFVATDIDERSLEYAQRNVRRNDLYRRISVVRSDPAGPILSHVLSEHSSISVFDFTMCNPPFYSSKEDVQRSAETKEYQPNAVCTGADVEMITSGGEVAFVRKMVRESLELRSRCRWFTSMLGRLSSLAEIIALLREHQIDNYAVTEFVQGQTRRWAIAWSFGDVHLPDAIARISNPSVHSLMPAHNTVQQVYPEGTSLEGLLAAVASALATIDGVSFRPLKPRPPHSSPLAPCLDALVSATGDTWSRAARRRRMREETMEVDREAAPTLVCRVICATHMGGGSEGAGLQCHWVRGRDRGLFGSFASHLSRKVYAALSTSSQE

SEQ ID NO: 118 - protein, 438 aa, Trametes coccinea
MHARNPYRTPPDFLALAEAYPPLKPHIVLARNGPIIDFKNETAQRLLTEAILLRDFSLKVELPPGRLCPPVPNRLNYILWLEDVVATTTLALELSGDRAVRGLDVGTGASAIYPLLGCRTNPTWSFTATELDELSLRFARQNVEGNNLQQRISVLSAGPSGPILAMLKDSDVVYDFTMCNPPFYSSREEVLQSAEAKEFEPNAVCTGADVEMITPGGEAAFVGRMVEESLELRDKCRWFTSMLGKMSSLASIVHLLRSKQVDNYAISELVQGQTRRWVIAWSFGDVRLPDPISRLSHSGIQHIMPSRNTLHQPLPDAQPGTEVATLLKSVLDSLAGLSLRQVNIDGSSTEVEHLASAARNTWSRAARRKKQETMYVDEHGEAGPKLVCRVCYQEASDAGKSTRAGQLVFHWLRGRDRGLFESFASHIERKVIAAVSAK

SEQ ID NO: 119 - protein, 441 aa, Fibularhizoctonia sp.
MHPRNPYRTPPDYAALARSFPELKPYVSRNANGTVSVDYQDEAALRCLTRALLYRDFGLSVDLPKDRLCPTVPNRLNYILWIEDILNVSSLSRLQSNSEATVRGLDIGTGASAIYPLLGCRVSPRWDFYATDIDAQSLAHARANITRNGLQGRINLVAADPKGSIFGPLESKHDTTFEFTMCNPPFYSSEEDIAQSAAVKKLASNAVCTGAAVEMITPGGEAAFVVRMVRESLALKMRCQWYTSMLGKMSSLTEIVGLLRENSIDNYAITEFVQGKTRRWAIAWSFGHVRLLDSLARLSGGPLQSLMPTRNTCRRSFAVPRMVLHKHLILVLDGIEGTSQTPMSIPVGAGDADGLYGLQISASRDTWSRAARRKRQHGAMDISLDNDEVGMKCLIKVLSVEEAREGAEAVVLECTWVYGHERALFESFWGHVCRKIGEANG

SEQ ID NO: 120 - protein, 436 aa, Polyporus brumalis
MHPRNPYRTPPDFLALAEAYPALKPHLISASHGTTVDFKDETAQRRLTEAILHRDFGLKMDLPPGRLCPPVPNRLNYILWLEDVVEAMDLAEHPVERARRVVRGLDVGTGASAIYPLLGCSTHSNWTFTATEIDSLSIEYARRNVLQNGLEGRISVVQADPDGSILAPLAQSDVPYDFTMCNPPFYGSREEVIQSAESKELEPNAVCTGADVEMITAGGEAAFVGKMVQESLRLREKCRWFTSMLGKMSSLTHIVHLLREHAVSNYAITELVQGQTRRWVVAWSYGDVRLPDSIGRLSHHALQSILPPRNTLVQPLPQATSPAQVTPVLATVLASVDGLTVRPLSAASGPADVLVMATENTWSRAARRKKRDAMPVETDSGPRAEVQLICRVKLAGSVKEDNRVTMAFDWVAGKDRGLFESFASHVERKVVGAFKT

SEQ ID NO: 121 - protein, 436 aa, Suillus luteus
MHPRNPYNKPPDFADLARRYPPLRPHVFINHTGSSTINFRNLPAQKRLTEALFRLDYGLSLTLPDDRLCPPVPNRLNYVLWLQDIVKFTCSSSTVRGLDIGTGASAIYPLLACSIEHTWNFVATDIDERSVQFAKQNISQNSMDSRIVVERVQADGPILQPLHTSQMEFDFTMCNPPFYSSAEDISRSAEFKEFGPNAVCSGAEVEMITPGGETNFVSQIFSESLRLRMKCRWYTSMLGKMSSISALVSLFREHSVDNYAITEFVQGQTRRWAIGWSFQDARLPDALARVSNPTLQSIMPSRNTLHYAFPGARSADILSSALRDVLTLINDITLATSATPAIHNHSSTMLVHARSNTWSRAARRGRLPETVCADQGLPVLRCSVECREQSSCTSSDNACELLFTWVEGKDRLMFESFASHVNRKVTSTLQEFGDVV

SEQ ID NO: 122 - protein, 442 aa, Heterobasidion irregulare
MHPRNPYRTPPDFVSLAESYSPLREHLIESAGGGVTINYKDEAAQRRLTEALMHRDFGLSLRIPEDRLCPPVPNRLNYVLWIQDILCATSDNSDDPVRGIDIGTGASAIYVLLACSLSPSWQLIGTDVDDISLRCALENVQRNGLSDRTHIMRASPDGPTLVPLAMDSTKSFDFVMCNPPFYSSAADVARSADTKTLGPNAVCTGADVEMITEGGESAFVCKMVRESVEFRERCRWYTSMLGKLSSLTEVVALLRSRSIDNYAITEFVQGQTRRWAIGWSFSDARLPDALARIPNPTLQSLMPPRTTLRQHLPRTPQLDLLRATLASIPHLRATPVPDAPPPTFLVSAPANTWSRAARRKRPSATPEAPMDVEAAGAAGAAEAKRESAGGERAPFMVCRACVAQDDEGAAVSFVWVRGRDRAAFEGFASHVGRKMRDATMAR

SEQ ID NO: 123 - protein, 322 aa, Wolfiporia cocos
MHPRNPYINPPDFASLADAYPALKTQLMRLANNIFTIDFKNELSQRCLTEALLHRDFNLTIAVPDDRLCPPVPNRLNYILWLQDILSATALITSDSEAQNLLGIDIGTGSSAIYPLLGCQSDQRWAFIATDVDEKSLDFARRNVQTNLLDSRISVVKSDPTGPILLRVLQDDTLLPQGVDSFSFTMCNPPFYSSREEILRSAEAKEFEPTAVCTGADVEMITPGGESAFVCRIVRESLEARTRCRWYTSMLGKMSSLSEVVTLLRESRIDNYACTEFVQGQTRRWAVAWSFDDVRLPDSLARTHSPALQSIMPPRNTRHKAN

SEQ ID NO: 124 - protein, 454 aa, Sparassis crispa
MHPRNPYRTPPDFSYLAKQYPALKPYLISKATGTTINFKDNEGQRRLTEALLHRDFQLSVTIPDDRLCPPVPNRLNYILWMQDIVHATSIAEPEISKRIIKGVDIGTGASAIYPLLGCQINPQWRFTATDVDDHSLQCARLNVQQNNLQDRITVVQSDPAGPVILSLFPNCTPEKVESTETSDMDFEFIMCNPPFYSSREDILHSAEAKEFEPTSVCTGADVEMITPGGEAAFVRKIVNESLTLKTRCRWYTSMLGKMSSLTDVVALLREKNIANYACTEFVQGQTRRWAIAWSFGDVHLPDSLGRVANPALQRLMPPRNTLRQSYPGTIPNRFASVTVSILSSIDSVSVQPCAEAARRPLDLLVTAHRDTWSRASRRRKADPGTIQTDVDSRPTFLCRIRNIGDNAGVPQTTQGGDGSALVFDWVRGIDRALFESFASHVGRKVSAMLISDVS

SEQ ID NO: 125 - protein, 456 aa, Daedalea quercina
MHPRNPYQTAPDFASLADAHPVLKSHLISTPNGVSIDFHDEASQRRLTEALLARDFNLSVSIPEDRLCPPVRMNYILWLQDILNVTYMTKLSSENRLIKGLDIGTGASAIYPLLGCQSDPTWRFVATDIDEKSLEYARLNVRDNSLHDRITILRSDSAGPLLCHILDSMNADSLAQEVAFDFTMCNPPFYSSKEDVRRSAEAKEFQPNAVCTGADVEMITPGGEAAFVCTMVSESLASRTRCRWYTSMLGKLSSLTEVVVSLRENHIDNYAITEFVQGQTRRWAIAWSFGDVHLPDSIARISNPSVHSLMPTHNTVQQTYPQPISFDRLSAAVTSVLASIDGLSTRRLNLRAPQSETSAPTGADVLVEAAGDTWSRAARRRKLHEAVMRVDASSGVALVCRVACLIYGAAESKQTTSTASAMLQCHWVKGRDRGLFESFASHLSRKVVAALSAKGS

SEQ ID NO: 126 - protein, 437 aa, Lentinus tigrinus
MHTRNPYQHPLDFLALAQAYPALKTHLIHTLHGAAIDFKNETAQRRLTEAILHRDFGLRLDLPSGRLCPPVPNRLNYILWLEDVLEAVALAEPSNDPARGHVRVFDIGTGASAIYPLLGCSTHPNWKFTATEVDPLSIRYARQNVSQNGLEERIHIVQADPDGGILAPLERSDVTYDFTMCNPPFYASREEVIQSAEAKEFEPNAVCTGADTEMITPGGEANFVGRMVQESVQLRDRCRWFTSMLGKMSSLTHIVHILREHAVTNYAITELVQGQTRRWAIAWSYCDVHLPDPIGRLSHHALQSILPPRNTLVQPLQQAASPAQVVPILTSVLASVDGLTVRQKSPESGAADVIATAYGNTWSRAARRKKRDAMPVEMDSRAQSEVQLVCRTRLGSNLGEESAVTLVFDWVAGKDRGLFESFASHVERKVVGALVLM

SEQ ID NO: 127 - protein, 446 aa, Laetiporus sulphureus
MHSRNPYRTPPDFTALAESYEPLKPYLITTAAGVTIDFKNDAAQRRLTEALLHRDFNISLTLPDDRLCPPVPNRLNYILWLHDVLEAMFLAEPERHVKTVRGVDIGTGASVIYPLLGCRSVPNWEFVATDIDEKSLQYARINVQQNHLDGRITIMKSNPSDPIFHCLEGDSHSEPFDFTMCNPPFYSSKEDVVRSAASKEFQPNAICTGADVEMITSGGESAFVRQMVRESLGCRARCRWFTSMLGKMSSLTEIIALLREQHIDNYACTEFVQGQTRRWAIAWSFGDVRLSDSLARIPTPAIQDLMPVRNTLQQPYPTATIEQLASTLSTTLASVEEISVRSLSPLNHSIAATDVVVTAVRDTWSRAARRKKPNADAMQSDAPVELSAALLCRVTCVEQNEARSKKRRDEGMFLEFNWVKGNNRALFESFTSHVGRKVSAGLACSD

SEQ ID NO: 128 - protein, 448 aa, Schizopora paradoxa
MHPRNPYQTPLDFENLAESFPPLSVHLLKTQDGRPVIDFKSVEAQRRLTEALLHRDFGLKLSVPAGRLCPAVPNRLNYILWIQDLIQASVRYDELRPERTIGIDIGIGASAIYPLLACKLEPNWEFIGTEIDELSQQSALKNISQNELSSRIRVVKTSEHDPILLPLFQDDGVMYTFTMCNPPFYSSSDDVERSAEGKAFEPNGVCTGSDNEMIVEGGEAAFVRRIVDESVNVSTRCRWFTSMLGKLSSVTEVVQALRTHKVDNYAITELIQGQTRRWVIAWSFTDIRLPDSLARPTSDSLRQFLPLPNELQQPYQPTLDHISIRSALEGVLKNIDGVTFTELDSKDSPTSSPLWELLVKASRNSWSRSERRKKNAGNAATESKTIAGIPALSCTIREVSPLGPSSTIDGKSKLVLQCSWVRGRDRGLFESFWSHVSRKVGVALGGQS

SEQ ID NO: 129 - protein, 430 aa, Rhizopogon vinicolor
MHPRNPYNEPPDFTDLARHYPPLRPHVFINHTGSSAINFKSLPAQRRLTEALCHRDYGLSLTLPDDRLCPPVPNRLNYILWLQDIVISTCGSSTVRGFDIGTGASAIYPLLACRLEPTWSFIATDIDDRSIQLAKQNIAQNSMEGRIVIEHMRADDAILQPLHTSQMNFDFVMCNPPFYSSAEDVSRSAEFKELGPNAICSGAEVEMITPGGETSFVARIFSESLQLRTKCRWYTSMLGKMSSIPDVVCLFREHNVDNYAITEFVQGQTRRWAIGWSFQDARLPDTIARISNPALQNIMPSRNTLHHSFPDARSAYILESALRNVLTIVDSLSVTSMASATPEGSSTTMLVHARGNTWSRAARRKRLPAAVSADQEPPVLRCSIECCSKVDTPCEIIFTWLEGKDRSVFESFTSHVSRKVISALQELGDG

SEQ ID NO: 130 - protein, 334 aa, Fistulina hepatica
MHPRNPYASPLDFSQLAESYPALKPCLIPTSHGDFTISYRDARSQMLLTQALLNRDFGLSVRLLEDRLCPPIPNRLNYVLWIQDIVEASSLSDQVSQRGREIRGIDIGTGACAIYPLLACSLEQSWKFCATEIDQHSLDNAKAVVADNGLVSRIEILQAKEDGPLLLPLKLYNFDFDFSMCNPPFYSSREEMATSARVKESRPNAACFFFRSAFTSETDVAMQVCTGAEVEMITPGGEAVFVNRMIEESRALRTRCQWYTSMLGKMASLFAVCEALRAHSIDNYAITEFVQGQTRRWAVAWSFGDARLPDSMARISNPDLRSLMPPRNNLQQPF

SEQ ID NO: 131 - protein, 474 aa, Grifola frondosa
MQPRNPYRTPPDFVALAAAYPPLQPHLIQTANGATINFMDDAAQRRLTEALLHHDFRLSMTLPNDRICPPVPNRLNYVLWIEDIIEATSLADPPHHPEQIKGLDMQVHVLLYHGCVRADDSNSGTGASAIYPLLGCQMHRDWSFVATDIDEVSLQYARLNVRQNALEDRVTVVQSDPAGPIFLPLTNAREQEMEASISQDLEFDFTMCNPPFYRDREEMVKSAEGKESAPNAVLTGADVELITPGGEVAFVGKMILESLHIQKHCRWYTSMLGKMSSLKDLAALLREHQIDNYAISDLVQGQTRRWVMAWSFGDARLPDSLARIPNPALQSIMPLRNTFHQVFEQARSADNLAHTLRTVLASISGLSVRPRDDSEDIAEAAQVSDVLVSATRNTWSRAARRRNGAASAPPESSAPVLVCRISCLESDSNGRRSDGQAAGAILQIDWVKGIDRALFESFSSHVGRKVTAAFAAEI

SEQ ID NO: 132 - protein, 445 aa, Coniophora puteana
MHPRNRYNTPPDFTSLAKRYPPLRPYVFINEDNVAILDFQNIDAQRRLTEALLHCDFNLKITLMEDRLCPPVPNRLNYILWIQDIIRSCDLPERPVRGIDVGTGASAIYPLLACSMDPSWHMVGLEIDDESARCALQNVAANNLSDRIDIRMSVLDGPIFALFDDDLDTQYDFTMCNPPFYGSAQEIAESAEGKLYGPRSVCSGAAVEMVTPGGEVAFVSQMVRESVQHKTRCRWFTSMLGKLSSVSVVIELIKALGIDNYGITEFVQGQTRRWAVVWSFGRERLPDSITRIRNPSLQKHMPPHNCLYQPFSSEHTVTQLQDAVQRVLDAIEGVSWSCNMHKSEDSGEESPAPETSSRMIVKAAQNTWSRSARRKKKAEMEEQSDALASGLRQVVEPILRCSMKCMDNVEELELEYTWTEGEDRGVFESFASHVNRKVGDLLAGG

SEQ ID NO: 133 - protein, 462 aa, Pterula gracilis
MHPRNIYNQAPNFQQLARHYPQLKEHLISLPRGDTTIDFRNPTSQRCLNDALLHRDYGLRITVPEDRLCPAIPNRLNYLLWIQDVLDATTEDINDAPSVKGIDIGTGSTAIYPLLGCKMRSSWSFVGTELDPKSRACAISNVACNSMEDRIEIFEASAGGPLLGPLSSSEGPRYEFTMCNPPFYTSAQDVLRSAEGKELGPNGVCTGAEVEMITDGGEVAFVSRMISESLSHPSACRWYTSMVGKMSSLSTIVALLREHKINNYGLTELVQGQTKRWAVAWSFFDKRLPDELSRIPGTSSNSALLPSRGTLTQTLSAQGTPAGRIVTMLDEVLGDVERISQRSCEFLDPIWTQSSSVAQRHPTNSRLVLATENSWSRSARRRRKAELACVSANETRTESTPAQHPPQSEVVTPIMTVLLSLITRPEGEVSLECRSVTGNDLALFEGFFGYVSRKLEASVVES

SEQ ID NO: 134 - protein, 417 aa, Dentipellis sp.
MHPRNPYRTPPDFAALAEHYPPLQQQSASGGPTIDFNDEQAQRRLTEALLHRDFQLSVTIPDNRLCPPVGAFWQLNYILWIQDIISATASDQNASVRGFDIGTGSSAIYPILGCRLCPNWHFIGSDIDRDSLASARTNVEQNNLSDRIEVVEVSADGPILRPLAVSRVTFDFTMCNPPFYSSAEDVARSAEVKEFQPNAVCTGADIEMITEGGESHFVCRMVEESLALKDRCRWYTSMLGKLSSLTDVVSRLRSHSIDNYAITEFVQGQTRRWAVGWSFTGERLPDSLARISSPGVSSLMRPRNNLRQALPDNPPPSALTEVLSSISGLTLSSTTQPITISAQSNSWSRAARRKQAAGASGAPTPGPPLLVCRASVVQDDEGPAVVFVWARGRERLAFEGFASHVAKKMRDMVRGGA

SEQ ID NO: 135 - protein, 418 aa, Cylindrobasidium torrendii
MHPRNPYNVQVNFDALSDAYPPLRKHLSGSKRIIDFKNDASLRCLTQALLHRDFKLSLELPDDRLCPPVPNRLNYVLWIEDIIATQPSRDVKGVDIGTGASAIYPLLACSRNPSWAFVATELDDFSLKYAKENVTLNTLDGRIHTLKATTSGHILPMDALSNEPIDFTMCNPPFYASLEEVKRSAEGKALEPNAACTGAPVEMITAGGEAEFVGRMVKESVQHGTRCRWYTSMLGMLSSVTHVVGVIKEHNITNYAITEFIQGQTRRWAVGWSFTNERLPDSISRISNPGLRPLMPPHNTIRQQVSSTDCVQGVFDSMSGIHITKEGERSVVVTAQANTWTRSARRKRKNVDTQMKVDTDGQRDSEGELRAEPALVCAVELVTTGNLSEVVFHWRKGAERNLFESFCSHISRKLVSRE

SEQ ID NO: 136 - protein, 438 aa, Pisolithus tinctorius
MHPRNIYATPPDFVALARSYPPLRPYVFLTHTGPSIDFKNPIAQRRLTEALLRIDFDISLSLPENRLCPPIPNRLNYVLWIQDIIRETAPDVAVIRGIDIGTGASTVYPLLACRLESTWQFVATDVDKDSLTSARENVNRNHLSDRVVITETSPSKPLLFPLEKDTTSMYEFTLCNPPFYSSADEMAQSAETKEFGPNAVCTGAEVEMITPGGEVAFVSRIFMESLRHKARCRWYTSMLGKMISLHEIVSLLRNNLVDNYAITEFVQGQTRRWAIAWSFGTRRLPDVHARISSPALQGIMPLRTTLYQPLANITSTALLSGILSQVLADVDGVSVILGSSSSGDHIYLVRASANTWSRSARRKKTTAPLQTDMPSQSTPVMQCRIRCRHGLSPTVTDNHKLQGAYLEYQWIDGKERSVFESFVSHVNRKVASSRLTNR

SEQ ID NO: 137 - protein, 405 aa, Peniophora sp.
MHPRNPYNVPPDFHELAQAYPPLQRHLLQTASGVTIDFHDELAQRTLTKALLHRDFNLDLTVPGDRLCPPVPNRLNYILWLQDIIQATSHPEDDPIIGIDIGTGASAIYPALFCRVVPDSAFVATELDERSFLSSQENVTRNCLSQRVQIFRATADGPILFPLVSTEIRFTFTMCNPPFYSSAEDIAQSAESKAFPPSAVCTGSEVEMITDGGEVAFVCKMVRESLVHRERCQWYTSMLGKLSSVTDVVKLLREHDIDNYGITEFVQGQTRRWAIGWSFGDRRLPDAIGRITTPTLRHAMPSRTSLREPLPTKPRVQSLRALVDSIPGASVIEVMSDPLALVCHLSANTWTRAARRKQGAAPRISAERPLLVVQCRVRELQQPCDGREFGCRNMWLFQTYKRILS

SEQ ID NO: 138 - protein, 538 aa, Crucibulum laeve
MHSRNPYKTLINFESLASAYPRLKAHLRTLHSGTKAIDFKDDVAQRRLTEAILFSDFGLKVVLPEDRLCPPVPNRMNYILWIQDIIDAYPGSSKRTVGGIDIGTGASAIYPLLGCKMASNWHFVATEIDSASYSQAVINIRTNKLEDRIQAVKATETGPILFPLFDLDENDVSYDFTMCNPPFYASLEEIEELALKKEAKPSAVCTGALTEMIYPGGEVAFVRQMVDESVKLGDKCRWYTSMLGRLSSVLEVVGVLRARKITNYAVTEFVQGQTRRWAVGWSFGDLRLPDSISRISHLPPAHSLYPFLPPKNTLRQTYPELASTKEAAHSGISRHLGRKLQEVLLDVLREIECVEANEAPPAGAERSSEPSSAAMLPHIRPSEDTFPLITVQAARNTWSRSARRKKKGVPNHSPATLPTRSFSSSTTMNTDLPATGLQRCETSIRTTHLVSCNAPVRQLEDNPMLTHLPLVCSVGWISPTSSSADAVPDVDGSSAQQSQPLPSTLEFQWIRGVDRALFESFMGHVTRKVGAALPASSD

SEQ ID NO: 139 - protein, 477 aa, Amanita muscaria
MHPRNPYRQLLDFASLAEAYEPLKPHLKPTRSPTAGGLSYTIDFKNSESQRQLTKAILYRDFGLRIALPDHRLCPPVPNSRLNYILWLQDIIKAHDEYMDRPASCICGLDIGTGASAIYLLLGCRVEPSFRFIGTELDDISFSYATQNVESNGLSDRIHLIKTTSNDPILLPFDLNPAWSCDFTMCNPPFYESEEEMARSAQAKELAPNAVCTGAQVEMVTPGGELAFVSQIVKESLKYTTRCRWYTSMLGKLSSLTKLVGLLREYAISNYAITEFVQGQTRRWAVAWSFGETHLPDSVARISNPTLQPLLPERNTSRHVINISLPPFSTRTVKSKQSIKALSEVLSQIKDVTVQRLYQVEHLEPTEEEEEDKSLYRLLVYAKQNMWSRSARRQRGRETGHKANDKGCAVGGPLTSIPATLDGLLCGIEIKAPLIKQEQQDVEMEFVFQWVHGQDRSMFESFVNHVTRKMKCNIVLD

SEQ ID NO: 140 - protein, 527 aa, Dendrothele bispora
MHPRNIYLHKAPDFQELAETYPELKRHLVHSTTNPGTAAIDFRNDESQRCLTKALLHRDFGLKLEVPSNRLCPPVPNRLNYVLWIQDIVQNTHLIESLCLSNFEKENAGIDPWNRKENLDQVRGVDIGTGASVIYPLLICSLEPTWTMYASEIDDLSLSYARNNVESNQLQGRINLVNSSGSFGDSDAGKPILWPLFLHEDVLFDFTMCNPPFYSSTEEVSKSAQGKAFEPNAVCTGADTEMITPGGETEFVSCMIKESIQIQTRCKWFTSMLGKLSSVEEVVRLLKELRVENYAITEFVQGQTRRWAVGWSFMDIRLPDSISRIPSPNPTIQRCLPQHNTIQQPVLLHMIKSTSKEDSQSITERLGKMIKEVLGAVDKAVFREVRGGKSVIKIVTSGEEQESQWQSYFVVRMKEDTWSRNARRRRKRQQQQQQLQTPEHLKGADRMTVDDDDFTQDSVITGEDGRSANGIGCTIHLGMKARERGPAEEQSKEEILIEFHWRWGREEDRGLFQSFCSHVSRKLFTTG

SEQ ID NO: 141 - protein, 441 aa, Rickenella mellea
MHERNPYKEPPDFAALADFYPPLRSHLRQTPTGCPAIEFKDAAAQRCLTEALLQRDFGLSMNLPEGRLCPPVLRLNYVLWIQDIMKATTRSSSAIAGIDIGTGASAIYPLLGSVIEPSWMFVGTEIDEISLQSALVNVHDNNLSARIQILKANPSDPTLFPIINHPESSYDFTMCNPPFYESVEEVRRSSDAKTFAPNAVCTGAEVEMITAGGESAFVRQMVDESVTIGSRCRWFTSMLGKLSSVSEVVGALRKHGINNYALTELVQGQTRRWAIGWSFQDQRLPDDLARCCSDALQGSLPLPNTLRQPLPAIRSVQHLQLSIQAVLAALEGIIVDVDDAADTRTSGMSYHISAFGNTWSRAARRQKKVAFNTDTTENNTGAHGNTVATIDATDNEVDNGELSQSQCLWMLECTWTRGRERALFESFWSHVSRKVGATLTL

SEQ ID NO: 142 - protein, 438 aa, Hydnomerulius pinastri
MHPRNPYVRPPDFLGLARQYPPLRPHVFLTHTGPSIDFKSQSAQRRLTEALLHLDFSISLILPEHRLCPPVPNRLNYVLWIQDIVKAHGPISEIVRGIDIGTGSSAIYPLLLCRLEPTWHFVVTDIDKDSLLSAQQNVERNGLSDRISVTEISPSEPILRPLQDDLSTVFHFTMCNPPFYSSAEEVALSTEAKEHGPNAVCTGSENEMITPGGEVSFVSRIFTESLRHRTRCRWFTSMLGKMSSIPEIVSVLHGHQVENYAITEFVQGQTRRWAVAWSFGTLRLPDAYARIANPALQSIMPQRTTLYQQLTSIQSLELLQNTVCRVLGDIEDLSIKLEKSSSDDRVPSVLAQAMDVTWTRSARRKKATKTSPQTSFQQSPALQCRITCKDGACPGGGKQSPTSVHIEYQWIDGSERSIFESFVSHVNRKVTAVQEGPR

SEQ ID NO: 143 - protein, 456 aa, Amanita thiersii
MHYRNPYQRPLDFFALAEVYSPLKPHLRQLVNIPGCYTIDFFNNDSQRRLTEALLYRDYGLTISLPNNRLCPPVPNRLNYILWLQDIARAHDRFIDTLKGDVYGIDVGTGASAIYPLLGCKTDSRWNFFATEIDDVSYCYARQNVEANRLGDRICLVKTTAPDPILLPLEDPTRLFDFTMCNPPFYTSKEEIMHSSKAKELPPNAICNGAEVEMITPGGELAFVGRIIEESKKYITRCKWYTSMLGKLSSVAELVKLLRQNEIVNYALAEFVQGQTRRWAIAWSFTDTHLPDSMARIPNPSLQSSLPQHNTLQYKINIRTSRLSVTEKGALQQLGAILLQTINMIEAVTICERRWEDSHSSPSGRLALPQTMLFTVVAQHNTWSRSARRRVQQQKGSDQERLQQEPATNNLQHSMTCGIELSYHVLPDTMTLRMQLVFQWIYGRDRSLFESFVNHV

SEQ ID NO: 144 - protein, 327 aa, Serendipita indica
MHPRNPYKEPPDFLELAQAYPELKPFVYISKKGNPSINFKDADGLRLLTLSLLHRDFGLDLELSTDRLCPAIPNRLNYILWIQDILANSSRPDETVRGIDIGTGASVIYPLLACKLSPSWVFVATDIDTRSLMVAESNVARNGLQNRIIVKQSLPDGPIISDVLLDPSFPAYDFVMCNPPFYGSREEVDQATEDKEFDPSAACTGADFEMITPGGEGVFVTRIVNESVDVGKRCRWFTSLLGKHTSVAAVVAAIKGLKIDNYGITEFIQGNTRRWGVVWSFSDERLPDNLIRPSSDSLHSLQPPSNQLRQPILSTVDPVMYSYRSTK

SEQ ID NO: 145 - protein, 439 aa, Jaapia argillacea
MHLRNPYRAPPDFVHLAESYPALKHIMSGASVNFTDDLFQRSLTEALLHRDFGLKLTLPHNRLCPPVPNRLNYILWLQDIITATSPDGSLPVRGLDVGTGASAIYPLLGCKTDSRWSFVGTEIDPDSIVSARRNANQNNLSDRIRIVEAAPDGPLFGPLHGDHDSPALPQFDFTMCNPPFYSSANEVLQLAELKSLPPNAVRTGAEVEMITPGGEVAFVSRMIDESLIIGTRCKWYTSMLGKLSSIAELVPLLRQHHITYGITEFEQGRTRRWAIVWTLTDYRLPDSLSRIAAPNPTLQPLMPQHNTLVQLYPSASESTVVLHALQFALADIEGISFSCSRQQPTSGDDDVEVDAAAYLILVEAGDDTWSRAARRRKARGVSTPMTTSSSAPRIVCRIMCRPEAGSVLLECNWSRGKEADRALFESLWSHLKRKVEASL

SEQ ID NO: 146 - protein, 442 aa, Heliocybe sulcata
MHPRNPYHNPPDFNVLAEAYPPLKACLIRTHGGNATIDFKDEASQRRLTEALLKRDFDLIIDIPDDRLCPPVPNRLNYILWLQDVLGETGEEPRPDVRGMDIGTGASVIYPLLACRFDPRWHFVATEIDDRSYAHALRNITQNGLQDRIQLVRAPQDGSVLQLSLFPDFIFDFTMCNPPFYTSKAEVDASAEAKLYEPNAVCTGGDVEMITPGGDSAFVKRMVDESLEIRGRCRWYTSMLGKLSSVAEVIQYLRQHEIDNYGVTEFVQGHTRRWAVIWSFGYIHLPDPLGRIGNPTIQHLMPPRNILRQPFSTSDPSKLSTALQAAVENLDGVITMHRTAPQPAVPSAGECLTLTDTAVAATKNSWSRAARRKTKSTSSAMDVQDVGNVVMRCRLQIRRMGHDESGKEDRLLVDATWVEGRERALFESFVSHAMRKATSSLA

SEQ ID NO: 147 - protein, 442 aa, Heliocybe sulcata
MHPRNPYHNPPDFNVLAEAYPPLKACLIPTHGGNATIDFKDEASQRRLTEALLKRDFDLVVDIPDDRLCPPVPNRLNYILWLQDVLGETGEEPRSDVRGMDIGTGASAIYPLLACRLDPRCHFVATEVDERSYAHALHNITQNGLEDRIQLVRVPKDGSVLQLSLFPDFTFDFTMCNPPFYTSKAEVDASAEAKLYKPNAVCTGGDVEMITLGGESAFVKRMVDESLEIRGRCRWYTSMLGKLSSVAEVIQYLRQHEIDNYGVTEFVQGYTRRWAVIWSFGYIHLPDSLARIGNPTVQHLMPPRNTLRQPFSTTDPSRLSDALQAAVENLDGVIIMNSTLPQRAAPSAGEDLPLADMVVAATRNSWSRAARRKTKSTASAMDVADVDNVVMRCRLQIRRMDRGEGGNEDRLAVDATWVEGKERTLFESFVSHVMRKATSSLA

SEQ ID NO: 148 - protein, 436 aa, Sistotremastrum suecicum
MHPRNPYKKPLDFSALASVFWPLKEFLITTSEGSSVVDFKDPDAQRCLTRALLKRDFDIELTLPEDRLCPPVPNRFNYVLWLQDIFRSEKVEDTVEEPFILIDIGTGASSVYPLLGCSVEPSWNFIGTDIDTTSLDWARRNVSANNLSHRISLELVNSSGPIFKPLFDDSTLMVGFTMCNPPFYSNLEEVAESKQLKEYEPFAVCTGSENEMITAGGEVAFVKQMVVESLELRTRCRWYTSMLGKLSSVIKVVDFLKECEVSNYALTQFVQGTTRRWAIAWSFGLLRLDDAFSRFQSPSLQAWMPLPNNFVHTMPFVESGDLLVSTQVILSAIPGLSHKVKDSDRRTIVVCSSGNTWSRAARRKAGTSSAQLTPDAPLMMRCDISVSEDERHNTGPSSLILKGRWSWGSDRTLWDSFWHHLTRKLRERFNTSTNTT

SEQ ID NO: 149 - protein, 435 aa, Pleurotus ostreatus
MHFRNPYKEPPDFAILAECYPKLRKYLIPGHDGHTTINFWNNDAQRALTEALMLRDFSIRLTLPAERLCPPVPNRLNYILWLQDIVRHSPATLDGTVRGLDVGTGASAIYPLLGCKLESKWTFIATDIDKTSYESALLNVARNDLQERIKVQLSDADAPLFKLLAVEDSSTVFSFTMCNPPFYATAEEVSRSAEMKHLPPNAVCTGADVEMITDGGEARFVRLMVEESLQHPLRCRWYTSMLGKLSSLMEVVDDLKSNDVDNYAITEFTQGQTRRWAVGWSFYRDRLPDWIARIGNPNPTIQGLLPGRNTVIQPLKSKTYCDPGVLMGVINEIKVASVQQKQTAEWDDSDAPLKLIVEVTGDTWSRKARRANKSSQTKFNAEMERWEKGIAVSVFSVEWKNDGGSLLVFQWIRGEDRALFMSFSGYVTRKVQDII

SEQ ID NO: 150 - protein, 519 aa, Phellinidium pouzarii
MLLSPVTMHERNPYRTPIDFISLAEAYPPLKLWLIKTANDSVTINFKDAAAQRCLTESLLSRDFELKLNLPEGRLCPPVPNRLNYLLWIQDLLLETFRSLPHSTGVVGIDIGTGSSAIYPLLGCRLVSSWNFVGTEIDLTSYASAAQNVNENGLKARIRILQVSPSDPLLSPLYRDPDFRYAFTMCNPPFYGSTAEVARSADGKALEPNAICTGADVEMVTPGGEEAFVQRMVSESLERGIGERCLWFTSMLGKLSSVGTIVSSLRAHEIDNYALTELVQGQTRRWVVAWSFTDVRLPDTLARALPSVHHALFPSPNTLRQPLRSLTHTNSLAPLSYRTLYQIVMPVLEGLDDVFVTEASAAISAEDSDDINAKHLSGDAFVLHVSAIRNTWSRAARRKKAKNVPIASGSNPSPGFAVLEPMAIDTSPALQTSISIAPALTVDIRAVYTPPAASLREKTYNRNSQKDGRNVIQYSADFVGMWALECTWRRGRERALFEGFWGYVCRRVGLALDSQATDI

SEQ ID NO: 151 - protein, 434 aa, Paxillus rubicundulus
MHPRNVYNHPPDFLGLARRYPPLRSHVFLTHTGPTIDFKSQVAQRRLTEALLHLDFNINLTLPDNRLCPPVPNRLNYVLWIQDIVKVSASSGDIVRGIDIGTGASAIYPLLACRLEPTWYFVATDIDRESLMFAHQNVERNDLSDRVCVVDVSSSTSILRSLEEDPAALFHFTMCNPPFYSSAEELTQSAEAKQCGPNAVCTGGENEMITLGGEVSFVSQIFTESLHHRMQCRWYTSMLGKMSSLPKIVDLLREHKIDNYAITEFVQGQTRRWAIAWSFGTHRLPDSMNRIANPALQGIMPSRTTLYQQIANIQSLELLYNTLRQVLADIKNASVKPELTGSDTGIPSILVQAMEVTWSRSARRKKATQPPLQTMSHQYLILQCRVNCAGGPPPGSEKQRAGGLYLEYQWVDGSDRGVFESFVSHVNRKVTTMQ

SEQ ID NO: 152 - protein, 422 aa, Rhizoctonia solani
MDVGPYETIDFGKLADAFPPLKPFLFMTASGRYSLNFKDDAANRTLTQALLKRDFGLQVTLLDDRLCPPVPNRLNYVLWISELVKVLDLDQPIVGLDIGTGSTAIYPLLACSIHKTWRFVAADIDSRSLAAAQTNIEQNPTVKDRIHLYPTTQDAPILSPLLPENLARIATSHIAFSMCNPPFYSDLEDVNRSAENKEYGPHAVCTGALVEMITPGGEVAFVQRMIDESINLREMCRWYTSLLGKMSSVTSLIHSIKEKGIDNYAITELVQGSTRRWVIAWSFTDIRLPDTLARPKSSSLKSIAPLPNHLHHPTTQPISHASLLQALADVPKLQYQQLQDPPRVCATVYEVTWTRAARRRMARDGSTTEQVQNEDARPVMICEVMVVDAHTLQVRWVRGRDRIIFESFWGYLSKKLDTSVST

SEQ ID NO: 153 - protein, 426 aa, Neolentinus lepideus
MHVRNPYRNPPDILLLADAYPALKACRRLTEALLKRDFNITVQIPDDRLCPPVPNRLNYILWLQDILSETLGDQIRGIDIGTGASAIYPLLACRLDSRWRFVATEIDEKSYTCALSNIGQNNLQGHIELVRATPDGPLFPFSLFPDATFDFTMCNPPFYTSKAEVEASADGKLREPKAVCTGAEVEMITPGGEAAFVKRMIDESLDSQERCRWYTSMLGKFSSLAGIVEYLNQREISNYGITEFVQGQTRRWAIIWSFTKTRLPDYLGRIRNPTIQHLMPPRNTLRQPFSTTNLSRLTAALENALANLDSVTFAPNTVQQTVAVSDDEELLLTDILISATRNSWSRAARRKAKNPNAASQSAMEIEASTVVMRCRLQIRRVVHSHDRADKQEGLVVDASWMEGQDRALFDSFVSHVMRKAEMASAE

SEQ ID NO: 154 - protein, 416 aa, Moniliophthora roreri
MHSRNRYIQTPDFGQLAEAYPALKKFLKGATVDFKDPDAQRCITEALLQRDFNLKIQIPDDRLCPPVPNRLNYLLWIQDILRACPNTNEEVVGIDIGTGASVIYPLLGCRLEGSEIWRFIGTEIDELSYTSAKQNVESNNLAERITIVKIRAEADEPILAPLFTSSTSQRFAFTMCNPPFYASHEEMLHSAEAKELAPNAVCTGAPTELLTPGGEIAFITKMIHESTDQATRERCLWYTSMLGKLSSLGPIVDKLKEYGIDNYALTQFIQGQTKRWGVAWSFTDLRLPDAIARIQNPSITQYLPPRNTIRQSVPTPTTLDTVAHIVSSIGGSVSTARRVEYMIVEARGDTWSRAARRRQGKTEAVDSSQGVKMTCTIVVLETEKEKQVVFQWTKGRDRTLFESFSSHVCRKLMNAK

SEQ ID NO: 155 - protein, 428 aa, Ceratobasidium theobromae
MSASLRQSYENIDFGELAEYFPPLRPFLFENKTGGFNLDFKNDAANRTLTRALLKRDFGLEVTLLKDRLCPPVPNRLNYVIWITDLVKVTSPDDNIVGLDIGTGSTAIYPLLACSIHKNWHFLATDIDKTSLATAAINIQQNPKLKARVRLLSTTQDAPILSLLLPEALAQLLGPELRRPPVAFSMCNPPFYSDIEEVSRSANNKSTDPHAVCTGALVEMITPGGEAAFVRQMIDESIGLQDACGWYTSLLGKMSSLAALVDVLREKGIDNYAITELIQGTTRRWVIAWSFLDVRLPDTLARPQSQSLRSIAPPPNTLRHSIFDPNSRPLTHNAIIRVLTDVPKLRYEELQDPKRVRAIAYEVTWTRAARRRLARNPPEDMMIDDKSTPVVVSEISVIDEHTLEISWIRGKDRGVFVSFWGFLSGKLT

SEQ ID NO: 156 - protein, 452 aa, Hypholoma sublateritium
MHPRNRYRNVPDFIALAESYEPLRPYVTDSRIDFKDAEAQRRLTEAIMFRDFGITLHIPLNRLCPPIPNRLNYVLWIQDIVHAHSSVLKSHPQAVRGIDIGTGASAIYPFLICKTEPGWKMVATEIDEESHSFAQKNISGNDMQSQITLSKASASGRILFPLEDNVRFEFSMCNPPFYGSAQEVADLAKEKELPPNAICTGADIEMIYPDGGEAGFVGRMVEESEQFLTQCKWYTSMLGKMSSVLAIIELLRKRTITNYAITEFVQGQTRRWAVAWSFSDTHLPDSIARISSIPPSHALYPVLPPRNTLTQPFPGCMPARLYEALAETLRTIEADGVLATEVAPRAGSHHPSFFIEAQANTWSRSARRSRRPRAEMQLQPDSHTGNTVASAGKTNPSLTCSARVIIQETDAGSPTAATSTCSVEFQWIYGKERALFESFVSHVNRKIAPKLK

SEQ ID NO: 157 - protein, 425 aa, Calocera cornea
NFVELAEAYPPLKPHVFLRQGQPALDFRDPNVQRRLTEAILHRDFNLKLALPNNRLCPAVPNRWDYVAWINEILVSSYDVSPSSIHGIDIGTGASAIYTLLGCRSHASWSMVGTVDVDATSLHWARENVALNGLQDRIEVMAVDMSQPIVQPLVAHPDIQFDFLMCNPPFYSSADEIADLAAMKEFDPNGVCTGSDNEMIIAGGEVGFVGQIVRESVQLRTRCRWYSSLLGKLSSVREIVELVRSEKINNYVIGEITQGRTKRWAIAWSFGDARLPDGVGRPASLALKTLVPPSNTFAHRLASPMPPSEALGIVYGIAASISELELYVCAPALAFTATAKRNTWSRAARREQARRMSTDGEPTANAPIALQARISLKTTGDGGSAPPTVQIKWTIGQDRALYESFCSHFARKVDERARQPADHLA

SEQ ID NO: 158 - protein, 431 aa, Peniophora sp.
MHPRNPYSVPPDFSALAQAYPQLQRHLLQTTSGVTIDFHDELAQRTLTKALLYRDFNLDLSIPGDRLCAKSVWTQRLMQCTKAYDVISLNYVLWIQDILQATSSPEEGTKYGIDIGTGASAIYPLLFCRVVPDCMFVATELDGRSLLSAQENVARNQLSERVRVLPATVNGPILFPVASHQARFSFTMCNPPFYTSAEDILRSAEGKELPPGAVCTGSEVEMITEGGEAAFVCKMVQESLVYRERCQWYTSMLGKLSSITEVVELLREHKIDNYGITEFVQGQTRRWAIAWSFDDRRLPEATGRMTTPTLRHAMPPRTMLREPLPDKPQLCSLRTLIDSIAGASVVEVASDPPALHCSLTANTWTRAARRKQGDEPVISTGRPLLCVKIHVTQDNPSPALEFSWLTGHDHAAFESFSSHVGRKMRSAMAST

SEQ ID NO: 159 - protein, 585 aa, Armillaria ostoyae
MHNRNIYRRATDFVELAKAYPELENHLIPSPSSSSLKTIDFKNEESQRCLTKALLYRDFGVDVVLPEDRLCPPVPNRLNYVLWIQDIMREHPSSSVCGIDIGTGASAIYPLLACKLELDWSFVATELDDASFQLAESNISRNHLGNRVRVLQAHPGQPILFPLNTYPDGSFSFTMCNPPFYASLDEVSLSAEGKAMDPNAVCTGAPVEMVTPGGEAAFVRQISQNQTDEANRWYTSMLGKMSSLTEVVDLLKELSIENYAITEFVQGQTRRWAIGWSFTDERLPDSISRIPNTALRSLMPPHNNIVQSVPGDRVVEIREVLSAISGLETELHDGYVLVRAKEDTWSRSARRKRKRDVVHLPLACKMVCTIKVSKGGVEYQWDFVDAEGRVRYSGGTREQLVTDYRATTNSGSYEQYARNMSLPGSWTGDVVSFTRAGEYVPARYLGQESDCQELSGSEEYSYESYSSNEDVESQSHYTADYGGEDDYEYDTAYQRDPSPGPEYHPHSDTMQELEDHTYGSYQEESYFPGDYSEYHEEYEGSPEIDDSYENEVYSPPAFPELYSDPEYSDPDSYDGEAYDDDDDDD

SEQ ID NO: 160 - protein, 432 aa, Armillaria gallica
MHNRNIYRRATDFVELAKAYPELENHLIPSPSSSSLKTIHFKNEESQRCLTKALLYRDFGVDVVLPEDRLCPPVPNRLNYVLWIQDIMREHPSSNVCGIDIGTGASAIYPLLACNLELDWSFYNKLIKTLVELDDASFQLAESNISRNHLGNRVRVLQAHPGQPILFPLNTYPDESFSFTMCNPPFYASLDEVTLSAEGKAMDPNAVCTGAPVEMVTPGGEAAFVRQIVRESRQLGARCRWYTSMLGKMSSMTEVVDLLKELLIDNYAITEFVQGHTRRWAIGWSFTDERLPDVRDTSLLPRVTYLISEQSISRIPNLALRSLMPPHNNIVQSVPGDKIADIHEILSAINGLETEIYNGYVLARAKEDTWSRSVRRKRKRDAVHLPLACKMVCTIKVFKGGVEFQWVRGAGSERGLFDSFCSHVSRKILAER

SEQ ID NO: 161 - protein, 452 aa, Gloeophyllum trabeum
MPGIRIATRQTLFSSPTRTRHSNHASSLRRRGELQSTLRTNNLKGDPVTHEYWLVPHSLGTWRRRLTEALLHRDFGLRVTIPGDRLCPPVPNRLNYILWLQDIVRETSDNPDGLVRGIDIGTGASAIYPLLACRLQPNWHFVATEIDQASYNHALANVLANGLADRVQVVRASPDAPLLPLGSLPDDTFDFTMCNPPFYASKEEVDASAGGKLAEPSGVCTGAAVEMITPGGESAFVRRMVDESLVLRERCRWYTSMLGKLSSVTEVVGHLKANDVPNYALTEFVQGHTRRWAVAWSLADRHLPDELARARTPALAHLLPARTALRQPFPHAPDAAALAAALASIDGAVIAHRAHEAEAEVEVEVGRDTWSRAARRKHKDRRASAGGGMRCRLGMQRDGKEGGAGMVLEARWVRGRDRALFESFVSHVGRKVGAALAARRESALAQHAGRGS

SEQ ID NO: 162 - protein, 425 aa, Thanatephorus cucumeris
MSVVPYETIDFGQLAAAFPPLKPFLFKSASGGYSLNFKDDAANRTLTRALLKRDFGLDVTLLEDRLCPPVPNRLNYVLWISELVNVLGLDEPIVGLDIGTGSTAIYPLLACSMHSTWLFIAADIDSRSLAAAQVNIEQNTGVRNRICLYPTTSDAPVLSALLPENLSRIGIQDARVTFSMCNPPFYSDMEEVNRSAESKEYDPHAVCTGALVEMITPGGEVAFVQRMIDESLSLRETCKWYTSLLGKMSSVTALVNSIKEKRIDNYAITELVQGTTRRWVVAWSFTDTRLPDTLARPKSSSLKSVAPLPNTLHHTTSQPTSHQSLIQVLRDVPKLQCQEQSTPEGVHVTVFEVTWTRAARRRVARSTPTPGQEQNQDVNPIMVCEARVTDAHTLEVQWIRGKDRSIFESFWGYVSKKLDAGVLAQ

SEQ ID NO: 163 - protein, 529 aa, Stereum hirsutum
MQRRRLTEALLYRDFNLVVTIPQDRLCPTVPNRLNYILWLEDLLTSTAPPQITSSGNGPISSRQMSCRGIDIGLGASAIYPLLACRISSNWTMVGTDIDAMSLQSAERNIAKSNLTSRISIIKSQTTAGATIFPSQLSDFRESCFDFTMCNPPFYSSKVDVSRSAQGKSTGPNAVCTGADVEMITHGGEAAFVRRMVQESFLLRDRCRWYTSMLGKLSSLAEIVEALRENKIDNYAITEFVQGQTRRWAIAWSFGELRAPDTISRISNPTVQNLMPSRTTLYQSLYPPTPSSESVIAFSSTNLRDTLQGVIRSVPELDFKAGSFVSSSDSHPPTNPVPSTSPPETVYSSIPSSSELIPPPNIATLSSASTSSDGYFLISAPRNTWSRAARRAGANSRKRKRDTAEDTQDDISSREGGGTTNGGIRPSGSSNPPLESPILGCRVFLVDNTAAYRSTASSSKSTTSISQEGTASKPNVEGPAERVTETEQSVKVGFEWVKGRDRAVFEGFVNHVGRKMRDAVAGRDCKTGG

SEQ ID NO: 164 - protein, 456 aa, Serendipita vermifera
MHPRNLYLIPPDFAQLAESYPPLKPFIYVNKHGQPLINFKDAAGQRCLTEALLHRDFGLKVEIPPDRLCPAVPNRLNYVLWIQDILTATLQPESTTSIAKGIRGIDIGTGASVIYPLLACAMAPNWSFVATEIDRGSLIAAENNIASNGLQNRISPVLVDPAGPLFRHLFEDASVFLECDFLMCNPPFYASKEEISRAAEDKEFDPSAVCTGADVEMITTDGEAGFIQRIVHESLIVGTHCRFYTSLLGKHSTIATIVNLLRSLKIDNYGLAEFVQGHTRRWGIVWSLGEERLPDTLVRSTSDSLHALLPLPNTFRQTYPSAITRSYQVLSNTLKGLDTLCHELEGVNLNQIPIVPESYEALATITAQENTWSRKARRRLEKLRKEGGTGIQYAGSQPSLFLTVRCHFIKEANSADSPSEIYRLVLQATWTKGKDRDLFETFWSHLSRKFLDSSIM

SEQ ID NO: 165 - protein, 442 aa, Calocera viscosa
MVVSWCWITLGGKYGPQQQNFAELAEAYPPLKPHVFLRQGQPALDFRDPNVQRRLTEAILHRDFNLQLVLPNNRLCPAVPNRWDYVAWINEILINSYDVNPNSIHGIDIGTGASAIYALLGCRMHSTWSMIGTDVDDTSLHWARENVMLNGLQDRVEVMRVDSSHLVLQPLITYPEIQFDFVMCNPPFYSSAEEISDLAAMKEFDPAGVCTGSDNEMIIAGGEISFVGQIVRESAQFGTRCRWYSSLLGKLSSVKDIVKLIRSENINNYAIGEISQGRTKRWAVAWSFGDARLPDAVARPTSLALKSLVPPSNTFTHHLASEMPPSVALSIIFEVAMNVSDLELSTDTLSPPFTATARRNTWSRAARREHARRITTDVEQAANMPIALQTRISLQRDGDDSASGILHIEWAIGADRALYESFCGHFARKADERTKQLPNTLM

SEQ ID NO: 166 - protein, 505 aa, Dactylellina haptotyla
MHPRNIYQDTISFAKLAKDYPDFAKCLKGRNSIDFHDPEAVRQLAKALLKRDFNLDVDLPEDRLCPAIPNRLNYILWLNDLITDTHGYMTTPESNKVVGVDIGTGASAIYPLLGCSHFPHWQFITTDIDSTSLSNATRNIQQNSLDGRVTIVDVSASPTIFPPEVTENSLTIDFAMCNPPFYTSINDMLSSAKLKSVPPLSACTGSTTEMVTEGGEVSFVGRMVDESLKLREKIRWYTSMLGKLGSVEKIVDKLKQNGVSNYVVGEFVQGVGKTKRWAVGWSFSDQRAGDHLSRQPTSHSLKVHLPFPTTFRVPLPMDTTLSSFLPRVEELLKTSCSEFPTDTFEWTSVRLPYFTTMYGTIENLYSNGKGETNGNTWSRAARRKRKQLEALEGEGQGSSTTSSEPKFGFAVGIFIDATIQPAETAQKVRPKTGEANDVEDNEIGDEADAWDHDFISLPKSSVEPETNKGSFVLLRWTRGVDQVLWESFCGMLRRKILDGLVKPKD

SEQ ID NO: 167 - protein, 431 aa, Rhizopogon vesiculosus
MSFSVFINHTGSSAINFKSLPAQRRLTEALCHRDYGLSLTLPDDRLCPPVSLVVICFYFYLMPDTLEGSSAGNLMCRLNYILWLQDIVISTCGSNTIRGFDIGTGASAIYPLLACRLEPTWSFIATDIDDRSIQSAKQNIAQNSMEGRIVIEHMQADDAILQPLHTSQMDFDFVMCNPPFYSSTEDVSRSAEFKELGPNAICSGAEVEMITPGGETSFVARIFSESLQLRTKCRWYTSMLGKMSSIPDVVSLFREHNVDNYAITEFVQGQTRRWAIGWSFQDARLSDTIARISNPALQNIMPSRNTLHHSFPSARPANTLESVLRNVLAIVDGLLVTSTSATPESSSTTMLVRAQGNTWSRAARRKRLPAAVSADQEPPVLRCSIECCSKVDTPCEIIFTWLEGKDRSVFESFTSHVSRKVISTLRELGDE

SEQ ID NO: 168 - protein, 504 aa, Arthrobotrys flagrans
MHPKNVYRNGVSFAQLAKEYPGLARCLKGTSSIDFHDPESIRQLANALLRKEFNLEVDLPGDRLCPGVPNRLNYILWLNDLLLDTHEERLSRGPPKITGIDIGTGASAIYPLLGCAQFQTWHFFATEIDSKSLSSATTNITQNALEDRVTLLDVSSSSTILPEEVITTHPHPIDFTMCNPPFYASINDMLSSAKKKSVPPLSACTGSTTEMVTDGGEVAFVNRMVEESLKLREKVRWYTSMLGKRSSVEKVVEKLKENGVGNYAVGEFVQGAKTKRWAVGWSFGDRRAGDHISRQPTSHLLRSHLPFPTTYKIPLPIDAGLSTLLPRVEQLMRKSCADFPTESFEWSSVRLQYFATMHDIVENLYSNGKGQTGGNTWARAARRRRGMLKKGVAEGRVSEVPQEPRFGFAAGIFIGSSGPTPAAKGNSGVQEEKKEDDEDQDMVDETDAWDHDFISLPASSVEPEASKGSYVLLRWTTGVDHVTWESFCGMLRRKLLEGLAEMKM

SEQ ID NO: 169 - protein, 434 aa, Pisolithus microcarpus
MHATYTRFHPILLLLQGVIHRLDHMSSLPILAPPLISKTQLPRDALLHVDFDISLSLPDNRLCPPVPNRLNYVLWIQDIVRETASDVPLIRGIDIGTGASVVYPLLACRLEPTWQFVATDVDRDSLISARENVKLNRLSDRVLITETCSSKSLLSPLEEDTTLTYEFTMCNPPFYSSVDEMVQSAETKEFGPNAVCTGAEVEMITPGGEVTFVSRIFMESLHHKARCRWYTSMLGKMNSLHEVVSLLRGHQVDNYAITEFVQGQTRRWAIAWSFGTRHLPDAYARINSPALQGIMPLRTTLYQPVSNISSSLLPGILSQVLADVDGVSVTLDSSSSDDYIRSVLVQASANTWSRSARRRKVTASLRTDTHAHPSLVMQCRIQCRRGPSPTVTDKNKLHGLYLEYQWIEGKERSTFESFVSHVNRKVTSFRPMNC

SEQ ID NO: 170 - protein, 503 aa, Fibroporia radiculosa
MHPRNPYQNPPDFQQLADAYPPLKPYLVYSYHGVTIDFMDESAQRSDSSQMGCRVLIYPPYSIIETQNRRLTEALLYRDFQVTINIPEDRICPPVPNRLNYILWLQDVVDATAIAEPTDSERKISGIDMSFYNLSSSGLPFSPSLDFCCNWSVVTHRGLASLSFTSSLLSGNRLFNPDVDEKSLESARFNVRRNNLDDRITVVKSKPSGSMLLHLFESNSDGASTSNGVHFDFTMCNPPFYRNREEILRSAEAKEFGPAAVCTGADVEMIAPGGEVSFVGRMVQESVEIRTKCRWYTSMLGKLSSLTEIVTLLRVHHVDNYACTEFVQGRTRRWAIAWSFGDVRLPDCLARISSTEAQNLMPARNTLRQSYPQAKSLVHLASVVTAICALLHDISVRSPLPGEQCAGAGLEIIIAAPRDTWSRAARRKKAHGITMQTEPDSSAEPILVCRIVCVEEGDNRMREESASGSIKLRFDWMKGRDRSLYESFTSHVGRKVAAALGAC

SEQ ID NO: 171 - protein, 508 aa, Arthrobotrys oligospora
MHPKNVYKNGVSFAQLAKESPGLAKCLKGSTSINFHDPESIRQLAKALLKKEFNLEVDLPEDRLCPGVPNRLNYILWLNDLILDTHEERSSPGPPKVTGIDIGTGASAIYPLLGCAQFPTWRFFATEIDSKSLSSAANNISQNTLEDRITLLDVSSSSTILPEGEIISYSQPIDFTMCNPPFYTSINDMLSSAKTKAVPPLSACTGSTTEMVTDGGEVAFVNRMVEESLKLKEKVRWYTSMLGKRSSVEKVVEKLKESGVANYVVGEFVQGAKTKRWAVGWSFGDRRAGDHISRQPTSHLLRSHLPFPTTFKIPLPIDAGLSTLLPRVEELMKKSCGDFPVESFEWSSVRLPYFATMYGTVETLYSNGKGETNGNTWARAARRRRKQLEKEAAEGRISEIPQEPKFGFAAGIFISLSGPVSEAGVVGIGGSSTQEEGKKGDEDQDMVDETDAWDHDFISLPASSMEPEASKGSYILLRWTIGVDHVIWESFCGMLRRKLLEGLTEMKA

SEQ ID NO: 172 - protein, 430 aa, Botryotinia narcissicola
MSAAANIYKEEIDFVALGNEDPDFGKLLKSNDQLDFSDPKSVQQLTKSLLKRDFGLNLTLPDDRLCPPVPNRLNYILWLQELIDTSSDVYTDSYNPHRQVHGLDIGTGASCIYPLLGCAQRASWRFTGTDIDERSIAFARANVQSNGLQARVQLIQTKSKGPLIPLDEIGCHSLDFTLCNPPFYTSAEDLLSSASLKQRPPYTACTGSETEMVCEGGEVSFVSRMIIESLQLRNGVQWYTSMLGKFSSLSKVIGQLKEHQIDNYAVTEFIQGSRTRRWAVAWSFIDRRPSIAVSRGCKSLQKSLLPFPAEQTITVSVCDKAVIATRLHDILSKLITLWNWESARFIGTGFCDKAVWSRASRRHLSETNDEKSNVTSPGLPENMAFGFKISFGDHEEEFPGTKVVIRWLKGHDSVLFESFCGMIKRKLQDI

SEQ ID NO: 173 - protein, 525 aa, Coprinopsis marcescibilis
MHARNPYKNGIDFRRLTGNYESLRTHIYLTNDGQCSLDFRDENAQRCCRELTKAILKCDFGVDLELPEDRLCPPVPNRLNYILWIQDIIAASRWSKSGPGTAERRIRGLDIGTGASAIYPLLACSLEGGWQMVGTELDHKSYEYAKRNVDMSDMSTRIQIREAGAEILGPLFDEREESFDFTMCNPPFYSSQTEIERLKGEKEGLPSQVCTGGELEMVYSGVASSDDDWERQGGEVAFVGRMVSESARVRERCRWFTSMLGRLSSVPKITAVLKCFEISNYIVTEFVQGRTRRWAIGWSFDSWRIPDDIGRLSHLPATHPMHSIQPHRTTLKYPVPVREQDGVSGRQAVHRQLLDILSHLGAVDERKLSAGASLSDQDGERTIVFKARENTWSRAARRKRKRADKTEAPVDGPHKRPKEGLGTALSEPPIAPASSVPTPATSPPVQLEASEETHWTLICATSIVVDKPELQQVSTDPNVQSDARDPLDDTERLCIEFQWVYGHDRSLFESFAGHVGRKVGTMVLA

SEQ ID NO: 174 - protein, 268 aa, Phlebiopsis gigantea
RCLTQALLHRDFGILMTLPEDRLCPPVCTKIFAPRLNYILWLQDVLDATDLPSSADKSVQGIDIGTGASAIYPLLGCSTNTTWNFYATEIDETSLTCARQNVVENHLEARITVLQADFDSTILPCEVFEQSSQLDFTMCNPPFYRNREEISISAEAKQLGPNAVCTGADTEMITPGGEVSFVRQMVLESLRWSTRCRHFGLGRWFTSMLGKMSSLTEIVELLKVNKIGNYGITEFVQGRTRRWAIAWSFGRTHLPDVSERTANRRVLI

SEQ ID NO: 175 - protein, 412 aa, Piloderma croceum
RCLTQGLLYHDYGITLSLPNERLCPPVPNRSIIPLLCITLNCCDSHRYAFRLNYVLWIQDIICKFSARFSSFLPSSLTFLFLSSGTGASAIYPLLSCRLEPQWHFIATDIDECSINSARLNVNNNDMQHRIDILRVEADGPIFAPLSENSNTSFDFTMCNPPFYSSAEDIAQSAESKEFGPNSASADVEMLTPGGESAFVRRMILESIKFRTRCLWYTSMLGKMSSLFDIVALLRNHSIDNYAITEFVQGQTRRWAVAWSFGDIRLPDVSSQSFVAGSAHSLHISLMAVFQSIDGASYQEVSEDPGFLTSPLLVCAKQNTWSRSVRRKKVSIPVQTSDVGLLETQPPALRCIFGCKMGGTEQQTLVLEVNWVQGRDRPLFESFWSHVCRKLEGRLQDSELGKAMVIEDSERL

SEQ ID NO: 176 - protein, 448 aa, Pyrrhoderma noxium
MHHRNPYKRPLDFDALAKSYPPLVPFLIKPKLAIDFKNAAAQRRLTEALLYRDFQLKLSLPDDRLCPPVPNRLNYLLWIQDVIRETLYTLDTVGEIIGLDVGTGASAIYPLLGCRLEPSWKFLVTEIDSTSYSFACSNIASNDLEHRVQVNKVTQNDPLFLPLFENPAKNFAFTMCNPPFYSSVEDIEKSADEKNFEATSVCTGSEIEMITMGGEEHFVKRMVEESFKPSIRDRCLWFTSMFGKLSSLASIIGYLRDLGVGNYIVTELVQGQTRRWVIGWSYGDAHVSDDVARNMPWVHHALFPLPNTLKQTFSGPRTLTSGTLKDLLIRVVSSLKGASTKVLTALSEENGNNMDVPYSVTIRVFAATNTWSRAARRKNQMDTDLSDITRAAPALVVDIKIMGNKSESILESSWILECTWRLGKDRKLFESFWSHVNRKVLAEVLIMR

SEQ ID NO: 177 - protein, 510 aa, Coprinellus micaceus
MHPRNPYNEALDFKLLASKYPPLQAHVNQNGGIDFLDPAAQRALTKAILKTDFDLDVELPDDRLCPPVPNRLNYVLWIEDIVEATRKFTNPSRGVSGLDVGTGASAIYPLLCCRQNPIWKMFATEIDPTSLSRAQRNVSTNGLDGRIHISRATANDTDSSSPSSHIFGPLFADPNLEIDFTMCNPPFYSSAAEIHNSKTEKEDEAFSVCSGSTNEMIYSPPCSSSSSAVASSLPSPYAECEREGGEVAFVARMVEESLVKRGRCGWYTSMLGKMSSVPKIVGLLKAVGITNYAVTQFVQGQTRRWALGWSVGGCWRLPDAISRLSHLPSSHSLAKVQPSRTTLEYSLDKDPKTALHDTLEGAKLADILEVEKVASSTGVVVEFLVKARANTWSRAARRNLKQKAAQAPGDELRGPGEGTLKRKRGVDEGQGGSSAARKKGRVDGDHPTALEQDEYRMICTVFLLAPTRDLGEVASKRWTLRVQWVYGKDEDREMFEGFASHIERKVSQGA

SEQ ID NO: 178 - protein, 515 aa, Coprinellus micaceus
MHPRNPYNEALDFKLLASKYPPLQAHVNQNGGIDFLDPAAQRALTKAILKTDFDLDVELPDDRLCPPVPNRLNYVLWVEGIVEATSKFTNPSRGVSGLDVGTGASAIYPLLCCRQNPIWEMFATEIDPTSLSCAQRNVSTNALDGRIHLSRATANDSDSSSPSSHTFGPLFADPNLEIGFTMCNPPFYSSAAEIHTSKTEKEDEAFSVCTGSANEMIYSSPSSSSSAAASSSPSPSPYAECEREGGEVGFVARMVRESLVIRERCRWYTSMLGKMSSVPKIVGLLKVVGITNYIVTQFIQGQTRRWALGWSVGGWWRLPDTISRLSHLPSSHSLATIQPARTTLEYSLDKDPTVVLHDTLEGMKHGGILEVEKVTSPTGVVVEFLVKARENIWSRAARRKMKQKAMQAHPATPADKTGDPSDGTRKRKRDVDEGQGGSNTARKKGRVDSNHPKAPEQDEYKMICTVSLSALTGELGEAASKRWTLRMQWVYGKDEDREMFEGFASHIERKVSQGA

SEQ ID NO: 179 - protein, 425 aa, Amorphotheca resinae
MTSVGNPYKEDIDFAALAIQDADFARVLKPNGQLDFSNPESVQQLTKSLLRRDFKLKIELPPDRLCPPVPNRLNYLLWIQSLLDTTSDAYTDTYDPQRQVLGLDIGTGASCIYPLLGCAQRPKWRFAGTDIDDKSLQFAKQNVDANAFQNRVKLLKTRPDGPLLPLDTMEFENIDFSMCNPPFYESKADMLTSATAKQRPAFTACTGSETEMVTPGGEVAFVSRMIDESLVLQDRVQWYTSMLGKLSSVATLVQKLRDKGVGNYAVTEFVQGSKTRRWGIAWSFEDLRPKMSVARGLNSLPKALLPFPSEYVIMLDGADITKVGRHLNDALSQLPLKWMWKPNISTGVGFSEKAVWSRAARRQAGRAEDTGIDEDEDMALGFKIQVEEVGEAGVKVTVRWLKGHDSVLFESFCGMIKRRSEESMK

SEQ ID NO: 180 - protein, 277 aa, Postia placenta
MSLRGLLALSCICISATLSVLRLNQCRRLTEALLFRDFHVSLEIPNDRLCPPVRVRLNYILWLEDILQAARLAEPLDTPPEAVTGIDVGTGASAIYPLLGCRSNPSWNFVATDVDEKSLHHARLNVQQNCLQERISVIASDPAGPILLHLFNLENRIRDPRAKYDFTMCNPPFYSSREDVLHSAEVKESEPTAVCTGADVEMITPGGEANFVCTMVRESLETRAQCRWYTSMLGKLASLTDVVALLRAETIDNYACTEFVQGQTRRWAIAWSFGDVR

SEQ ID NO: 181 - protein, 439 aa, Galerina marginata
MHRDFGVMLNIPSNRLCPPVPNRMNYVLWIQDIVHAHHSVLGSRPRKIRGIDIGTGATAIYPFLACKLEPTWELVGTELDDESFESARINVSSNDMQSRIDVQKASNDGLILFPLEESDENFEFSMCNPPFYESALEISQLAQEKELPPNAVCTGADIEMIYPNRGEAGFVERMVEESERFQTRCKWYTSMLGKMTSVSSIVQALRTRSINNYAITEFVQGQTRRWAIAWSFTDTHLPDSIARIPSISSKHALYSVMPPRNTLSQPFPNFGSDTIYSAVSEVLRSIDGVSATELSPPLPAAADSRPGCDSLSAEADNVSDNSVLLFFVEAQGNTWSRSARRSRHRQSEDKAKDVTSRTDQPTVPKPALTCSCRVTGASDTEFPSGNVAGGDAAVYSVEFQWVFGSDRSLFESFVGHVGRKVGLALQGGKSRRNEDPLPG

SEQ ID NO: 182 - protein, 428 aa, Hyaloscypha hepaticicola
MSTSNSNIYKDDIDFAALSLTDPDFAKVLKPNGQLDFSSPESVQQLTKSLLKRDFGLEISLPPDRLCPPVPNRLNYILWIQVLLDTTSDSYKDVYDLEREVLGLDIGTGASCIYPLLGCSQRSKWRFAGTDLDEKSLQSARQNVQANGLQNRIKLLQTQPTDPLLPLYKMKFENIDFSMCNPPFYESKAEMLTSAASKQRPPFTACTGSENEMVTPGGEVAFVSRMIEESLVLRHRVQWYTSMLGKFSSIAVLVQKLRNKGIGNYAVTEFVQGSKTRRWAIAWSFEDLRPTMGVARGVSSLQKSLMPFPSEYLIASSSGSITVGQRVNVILSQLPLQWMWEASISTGIGFSEKAVWSRATRRQVARKQGDAVEYNDPEMTLGFKIHVEPNPGDESGTKVTIRWLKGHDTVLFESFCGMLKRKIEDSTK

SEQ ID NO: 183 - protein, 427 aa, Hyaloscypha bicolor
MSTSNENIYKDDIDFAALALTDATFAKVLKSNGQLDFSNPESVQQLTKSLLKRDFGLNISLPPDRLCPPVPNRLNYILWIQSILDTTNDSYKDVYDPEREVLGLDIGTGASCIYPLLGCSQRPNWRFAGTDIDEKSLQFAGQNVQANELQNRIKLLQTRATDPLLPLDKMNIDFSMCNPPFYESKAEMLTSTASKQRQPFTACTGSENEMVTPGGEVAFVSRMIEESLVLQDRVQWYTSMLGKFSSVAVLVQKLTDNRVGNYAVTEFVQGSKTRRWGIAWSFDDLRPVMSVARGVSSLQKSLLPFPSEYLIVSSNDPMKAGQRVNEILSQLHLQWMWKASISTGVGFSERAVWSRASRRQVAKKQGEAMEEDDDPEMAFGFKIHVVAARGGESGSRVTIRWLKGHDAVLFESFCGMVKRKQEEPINK

SEQ ID NO: 184 - protein, 422 aa, Oidiodendron maius
METNNPYEVDIDFAVLALQDADFAKILKSNGQLDFSNPESVQQLTKSLLKRDFGLTIELPPDRLCPPVPNRINYVLWVQNLLDSTSDSYSDRYDPGREVIGLDIGTGASCIYPLLGCAQRPKWRFAGTDIDDKSLQFAKKNVVGNHLQDRIKLLQTQSDSPLLPLDIMVDISSIDFSMCNPPFYESTAEMLASAKAKQRPAFTACTGSETEMVTEGGEVAFVSKIIDESLILCHRVQWYTSMLGKFSSVATVIEKLRAHNIGNYAATEFIQGNKTRRWGIAWSFEDMRPKSSVARGLHSLPKSLLPFPSEYVIQLTNANGEEIGRHVNETLSLFPLKWMWKPTISTGVGFTDKAVWSRAVRRHSSKDQDMDEENIALGFKIHVGRGDTVDVVKVVIRWLRGHETVLFESFCGMVKRKLEETK

SEQ ID NO: 185 - protein, 429 aa, Aspergillus ellipticus
MRASRNIYKDEVDFSALALQSPAFAKHLKANGQLDFSDPDAVRQLTTSLLQRDFDLTVEIPGNRLCPPVPNRLNYILWLQDLLDTTGDQYQDDYDPDREVVGLDIGTGCCSIYPLLGCSMRPHWSFVATDIDDDNIRTSRETVSANKLDSRVKIIKTDPKDDLFALDSMLKLDRLDFTMCNPPFYSSRDELLASAEAKERPPFTACTGSEIEMVTSGGEIAFITRMIEESLRLRDKVHWYTSMLGKLSSVSVLIEKLLEHKNNNYAVTEFVQGNKTRRWAIAWSWSDLRPTVTIARATTAIPKHLLPFPSEYIFTTPTDSLDDLSAKVDAELSSLHIQWLWRKNLSTGVGFAMQNVWSRQARRKMQNPATRPDKAEIDETKAELGFKVQVRKDPIEETDARVVIRWLKGTDTVLFESFCGMLKRKVEGK

SEQ ID NO: 186 - protein, 430 aa, Hyaloscypha variabilis
MSSNDGNIYKDDIDFAALALTDAEFAKVLKSNGQLDFSNPESVQQLTKSLLKRDFGVKISLPPDRLCPPVPNRLNYILWIQSLLDTTSDSYKDIYDPEREVLGLDIGTGASCIYPLLGCSRRPNWRFVSTDIDDKSLQFARQNVQENGLQNRIKLLKPEPDDPLLLLDKMKIENIDFSMCNPPFYGSRAEMLTSAASKQRPPFTACTGSENEMVTPGGEVAFVSRMIEESLILRDRIQWYTSMLGKFSSVAVLVQKLRDNGVDNYAATEFVQGSKTRRWGIAWSFDDLRPVMSVGRGVSSLQKSMLPFPSEYLIVSSSDPVKAGQRVSQILSPLPLQWIWKASILTGVGFSEKAVWSRASRREVARKQGDAMEEDDDPEMTFGFKIHVIANPDGESGAKVTIRWLKGHDAVFFESFCGMLKRKLEESNNA

SEQ ID NO: 187 - protein, 421 aa, Moniliophthora roreri
MHSRNRYIQTPDFGQLAEAYPALKKLPRLSLKGATVDFKDPDAQRCITEALLQRDFNLKIQIPDDRLCPPVPNRLNYLLWIQDILRACPNTNEEVVGIDMGISDIPSSRMSIGRLGNLEIYWNCEEIDELSYTSAKQNVESNNLAERITIVKIRAEADEPILAPLFTSSTSQRFAFTMCNPPFYASHEEMLHSAEAKELAPNAVCTGAPTELLTPGGEIAFITKMIHESTDQATRERCLWYTSMLGKLSSLGPIVDKLKEYGIDNYALTQFIQGQTKRWGVAWSFTDLRLPDAIARIQNPSITQYLPPRNTIRQSVPTPTTLDTVAHIVSSIGGSVSTARRVEYMIVEARGDTWSRAARRRQGKTEAVDSSQGVKMTCTIVVLETEKEKQVVFQWTKGRDRTLFESFSSHYFRVFVFLREK

SEQ ID NO: 188 - protein, 430 aa, Botrytis elliptica
MSAAANIYKEEIDFVALGNEDPDFGKLLKSNGQLDFSDPKSVQQLTKSLLKRDFGLNLTLPDDRLCPPVPNRLNYILWLQELIDTSSDIYTDSYNSNRQVHGLDIGTGASCIYPLLGCAQRASWRFTGTDIDERSIAFARTNVQSNELQTRIQLIQTKSRGPLIPLDEIGCHSLDFTLCNPPFYTSTEDLISSASLKQRPPFTACTGSATEMVCEGGEVSFVSRMIVESLQLRNGVQWYTSMLGKFSSVSKVIEQLKMHKIDNYAVTEFIQGSRTRRWAVAWSFNDRRPSIAVSRGCKSLQKSLLPFPAEQTITVSIPDKAVIATRLYDMLSKLITLWNWESATFIGTGFCDKAVWSRASRRHLSETNDEKSSITSKGLPEDMAFGFKISFGDHEEESPGTKVVIRWLKGHDSVLFESFCGMIKRKLQDM

SEQ ID NO: 189 - protein, 430 aa, Botrytis porri
MSAATNIYKEEVDFVALGNEDPDFGKLLKSNGQLDFSDPKSVQQLTKSLLKRDFSLNLTLPDDRLCPPVPNRLNYILWLQELIDTSSDVYNDCYNSNRQVHGLDIGTGASCIYPLLGCAQRASWRFTGTDIDDRSIAFARTNVQNNGLQTRIQLIQTKSKGPLIPLDQIACHSLDFTLCNPPFYTSAEDLISSASLKQRPPFTACTGSETEMVCEGGEVSFVSRMIVESLQLRNEVQWYTSMLGKFSSLSKVIEQLKKYKIDNYAVTEFIQGSRTRRWAVAWSFNDRRPSIAVSRGCKSLPKSLLPFPTEQTITGSISDKAFIATRLHDMLSKLIALWSWESARFVGTGFCEKAVWSRASRRHLSETNDEKSNVTPKGLPEDMAFGFRISFGDHEEESPGTKVVIRWLKGHDSVLFESFCGMIKRKLQDM

SEQ ID NO: 190 - protein, 428 aa, Rhynchosporium commune
MSNIATFYRDEIDFTTLALQEPDFARALKPNGQLDFSNPESVQQLTKSLLKRDFGLQITLPPDRLCPPVPNRLNYILWIQRLLDSTSDSYSDSYDVEREVLGLDIGTGASCIYPLLGCARRPKWRFAGTDIDEKSFQFAKQNVQDNGLQNRIKLLQTHPEDPLLSLDKMGFESIDFTMCNPPFYTSAAELLTSASLKQRPPFTACTGSTSEMVTPGGEISFISRMIDESLLLKDRVQWYTSMLGKFSSIEPLVKKLKSNGVGNYALMEFVQGSKTRRWGIAWSFADLRPPVEVARGVASLQKVLLPFPGQYVVASDKNHVEIGEHVNKTLSELPLKWMWKPKISTGIGFCDRAVWSRAARRHVPKDKGELMGDEDEDDLAFVFKIVVEPNQGGLGGSRTTIRWLKGHDSVLYESFCGMLKRKVEEAAR

SEQ ID NO: 191 - protein, 425 aa, Phialocephala scopiformis
MAQNSTIYEDEVDFATLALQDSEFAKILKSNGQLDFSNPESVQQLTKSLLKRDFKLKLSLPPDRLCPPVPNRLNYIIWIQNLLDTTSDSYNDKYDPEREVLGLDIGTGASAIYPLLGCSQRPQWRFAGTDIDDKSLQFARQNVLENELQSRIKLLKTQPSDPLLPLDKMGFENIDFSMCNPPFYESKADMLTSAAAKQRPPFTASTGSENEMVTTGGEVAFVSRMIDESLILKDRVQWYTSMLGKFSSVGVIVQKLKENSIDNYAVTEFVQGTKTRRWAVGWSFDDLRPLMSVARGVSSLQKSLLPFPSEYYIPSKDDHVNVGLRVNETMSQLPLKWQWRGTITTGIGFSSKAVWSRAARRHVTKVESESMEEDEMALGFKIRVEQLPGGQPGSRTMIRWLKGHDSVLFESFCGMIKRKIEEAKN

SEQ ID NO: 192 - protein, 442 aa, Talaromyces islandicus
MNSSRNIYRREIDFRALALQSPEFSKRLKANDQLDFSDPDTVRQLTKSLLERDFKIRVDLPDNRLCPPVPNRLNYILWLQDLLDTTSEAGDDEYDPEKEVLGLDIGTGCCSIYPLLGCSMRPRWKFFATDIDEDNIISSRKTVSENQKSDRVTIVKTDPDDLLIPLDKLGIDRLDFTMCNPPFYESEQDLLSSAAAKSRPPYSACTGAAVEMITPGGEITFVSNMITQSMNLKTRVRWFTSMLGKLSSLSAIVQKLLDLDVENWAVTEFVQGKGTKRWAVAWSWMDWRPRSDVSRGLSTLPKHLLPFPSHFYVELPKDSKLEQVCSKLESELSVLRYLVYTWVTKESCVGFAREDVWSRKARRKFSKEQHTRSTEENDDPHVMGVEEQWKKEPKKVAALGFRVDLRLETDTTVSMVIRWLKGMDQVLFESFCGMIKRKFGEE

SEQ ID NO: 193 - protein, 431 aa, Aspergillus candidus
MRAARNIYRDDVDFAELALQSPEFAKQLKSNGQLDFSDPDAVRQLTKSLLKRDFNLDVEIPDDRLCPPVPNRLNYILWVQDLLDTTGREYRDEYDPDREVQGLDIGTGGCCIYPLLGCATRPLWKFVATDIDDNNIRTSRKNVSANGLESRIQIVETNPDDDLIPLAKLGVGKLDFTMCNPPFYASRSEMITSAQEKERPPFSACTGSEIEMVTPGGEVSFVSRMIDESLRLRSAVTWYTSMVGKLSSVSVLVEKLASYGIHNYAVTEFVQGSKTRRWAIAWSFSDYRPSVAASRSITGLPKHLLPFPSEYTFDIAHASIDDIGHKLDSELVEIPVQWVWRKSQATGIGFAMENVWSRQARRKLKSSDTSLEMQKASVDEEDAALGFKIQVKREGGQEDKGVRVLVRWVKGGDSVLFESFCGMVKRKVEGR

SEQ ID NO: 194 - protein, 428 aa, Aspergillus brasiliensis
MRASRNIYKDEVDFTALALQSPKFAKYLKSNGQLDFSDPDAVRQLTKSLLQRDFELEVEIPENRLCPPVPNRLNYILWLQDLLDTTSDEYRDNYDPDREVIGLDIGTGCCSIYPLLGCSMRPHWRFVATDIDNDNIRTSRETVSANKLDSRIEIIQTDPKDELIPLDTKLNVDRLDFTMCNPPFYASRDELIASAEAKERPPFTACTGAEVEMVTTGGEIAFVTRMIEESLRLRERVTWYTTMLGKLSSVSVLIEALLEHKNNNYAVTEFIQGNKTRRWAIAWSWTDLRPIASIARGTTAIPKHLLPFPSEYIFTTQSDSIDEVSTKIDSELSALHIQWLWRKNLATGVGFAMQNVWSRQARRKMQNPDAMAEMGEIDETKAALGFKVQVKKDAIEEKGVKIIVRWLKGRDTVLFESFCGMLKRKVGE

SEQ ID NO: 195 - protein, 429 aa, Aspergillus sclerotioniger
MRASRNIYKDEVDFTALALQSPDFAKHLKSNGQLDFSDPDAVRQLTKSLLQRDFDLKVEIPENRLCPPVPNRLNYILWLQDLVDTTGDEYRDNYDPDREVVGLDIGTGCCSIYPLLGCSMRPHWRFIATDIDNDNIKTSRETVSANKLDSRIEIIQTDAKDDLISLDTKLKVDRLDFTMCNPPFYATRNELITSAEAKERPPFSACTGAEVEMVTTGGEIAFITRMIEESLQLRERVIWYTTMLGKLSSVSVLIETLLEHKNNNYAVTEFIQGSKTRRWAIAWSWTDLRPTVTVARGTSAIPKHLLPFPSEYIFIVQSDFLDEVSAKIDTELSSLHIQWLWRKNLTTGVGFAMQNVWSRQARRKMQNPDAMADKATIDEAKAALGFKVQMKKDPIDENGVRVIIRWLKGRDSVLFESFCGMLKRKVEGK

SEQ ID NO: 196 - protein, 429 aa, Aspergillus turcosus
MRAARNIYKDDVDFTALALQSPAFAKYVKPNGQLDFSDPDAVRQLTKSLLKRDFNLNVEIPDNRLCPPVPNRFNYILWLQDLLDTTGDQYRDDYDPDRSVIGLDIGTGCCSIYPLLGCTTRPQWDFVATDIDAENVRTARENVINNGFDGRIRVFKTEPEDDLIPLDTKLDVQRLDFTMCNPPFYASREEMIASAQAKERPPFSACTGDEVEMVTEGGEIAFVYRMIEESLRLRERVVWYSSMLGKLSSVSVIVEKLMEHGNNNYAVTEFVQGSKTKRWAVAWSWTDLRPSMKVARGIPGFPKHLLPFPSEYMFEIMDQSIDDISDKIDKELSNLRIQWTWRKNLATGVGFAMENVWSRQARRKLQNGAATADMMEIDESTAALGFKVQLKQDKFEEKCVRVVVRWLKGSDSVLFESFCGMLKRKVEGR

SEQ ID NO: 197 - protein, 446 aa, Byssochlamys spectabilis
MKSARNIYKDEVDFAALALQSPDFAKHVKPNGQLDFTDPDAVRQLTKSLLLRDFGLKVDLPEDRLCPPVPNRYNYILWLQDLLDTTGDEYRDRYDPDRDVIGLDIGTGCCSIYPLLGCASRPRWKFVATGENTAESEIQEANHDDADVDEQNIESARRNVQQNKLESRIKVIRTIPEGPLIDLDQRLEVERLDFTMCNPPFYESEQEMIASAEAKQRPPFSACTGANVEMVTTGGEIAFVTRMIEESLELRERVQWYTSMLGKLSSVSVLVEKLMEYGNHNYAVTEFVQGNKTKRWAIAWSWADLRPEMSVARGIAGFPKHLLPFPSEFSFHISDKSIDEIGQKVNTELSFLPVQWHWRPGMAAGVGFAMENVWSRQARRKRRNEDAAVKKDEVDEKKAALGFKVQVKQERASANEVAVQVRWLKGTDTVLFESFCGMLKRKVEER

SEQ ID NO: 198 - protein, 429 aa, Aspergillus udagawae
MRATRNIYKDDVDFTALALQSPAFAKYVKPNGQLDFSDPDAVRQLTKSLLKRDFNLDVEIPDNRLCPPVPNRLNYILWLQDLLDTTGDQYRDDYDPDRSVLGLDIGTGCCSIYPLLGCTTRPLWDFIATDIDDENVRTARENVTNNGLDGRIRVFKTEPKDDLIPLDTKLDVQRLDFTMCNPPFYASREEMIASAQAKERPPFSACTGAEVEMVTGGGEIAFVYRMIEESLHLRERVVWYTSMLGKLSSVSVIVEKLTEHGNNNYAVTEFVQGSKTKRWAVAWSWTDLRPSMKVARGIPGFPKHLLPFPSEFLFEIADQSIDHISDKIDKELSSLRIHWTWRKNLATGVGFAMENVWSRQARRKLQISAGTADMMEIDESTAALGFKVQLKQDRLDEKCVRVVVRWLKGSDSVLFESFCGMLKRKVEGR

SEQ ID NO: 199 - protein, 486 aa, Hebeloma cylindrosporum
MLRDFGVRLHIPEDRLCPPVPNRLNYILWIEDIVHAHRIVEGYLGISRSQEIRGIDIGTGSTAIYPLLACKRNPKWKIIGTELDPASHMVALQNVNENGMQDSISVEKAEADGKVLFPLQTTDEIFDFTMCNPPFYSSQEDVETSARGKDDPTNAVCTGAETEMIYPGGGETAFVERMVIESVGERLRGRCRWYTSMLGKMSSVVHIVEMLTARSITNYIITEFVQGQTRRWAVGWSFSDIKLPDDIARVPSASSSTHVLYAVQPPRNTLVHVLQSPPPPSSGPKFEVHDLTNALKDVLLDVAGLEVREVMAHNLSGKQEQESNENETLSRPHIPGDLVPQTMEFVIRAGENTWSRSARRGKKRKRGGWESNESSTSNPTMKDPPSEITRKLGSPLPPALPVHEVQRELPALLCTARVLPVAAPSTSSSSSTIPPPYSPGQSALTLVAPRQLAIQFQWSYGRNSDRALYESFVSHVWRKVLVRFVG

SEQ ID NO: 200 - protein, 720 aa, Botryotinia calthae
MIRSKTIMSIISATEIPTVSLLYHLKKLAPYKTTDADELPPTPNQFFNDRIGLIRGDITHLEVDAIVNAANNSLLGGGGVDGAIHRAAGPDLLRECRTLNGCRTGSAKITDAYELPCKKVIHAVGPVYDSYNPKVSEQNLEGCYSTSLDLAVENGCKTIAFSALSTGVYGYNSDEAAPVALMTVRRFLESKKGEKMEKIIFCTFVPKDVAAYNEWIPRIFPTAESNADDDWEEVDEVEYAENGAVLAKGTGSAKGGSEASKVELPEVPTKEPVEDEEPAAKKQKSGDDKNYSKMSAAANIYKEDIDFVALGNEDPDFGKSNGQLDFSDPKSVQQLTKSLLKRDFGLNLTLPEDRLCPPVPNRLNYIVWLQELIDTSSDDYTDSYNPNRQVHGLDIGTGASCIYPLLGCAQRASWRFTGTDIDDRSIAFARTNVQSNGLQTRIQLIQTKSNGPLIPLDETGCDSLEFTLCNPPFYTSAEDLISSASLKQRPPFTACTGSETEMVCEGGEVSFVSRMIVESLQLRNGVQWYTSMLGKFSSLSKVIEQLKEYKVDNYAVTEFVQGTRTRRWAVAWSFNDRRPSVAVCRGCKSLQKSLLPFPAEQTITVSIHDKAVIAARLHDILSKLITLWSWEPATFVGTGFCEKAVWSRASRRHLNKTNDEKSNVASKILPGDMAFGFKISFGDPEEESPGTKVVIRWLKGHDSVLFESFCGMIKRKLQDM

SEQ ID NO: 201 - protein, 429 aa, Aspergillus niger
MRASRNIYKDEVDFTALALQSPEFAKYLKSNGQLDFSDPDAVRQLTKSLLQRDFELKVEIPENRLCPPVPNRLNYILWLQDLLDTTGDEYRDNYDPDREVIGLDIGTGCCSIYPLLGCSMRPHWRFVATDIDNDNIRTSRDTVSANKLDSRIEIIQTGPNDELIPLDTKLNVDRLDFTMCNPPFYASRDELIASAEAKERPPFTACTGAEVEMVTTGGEIAFITRMIEESLHLRERVIWYTTMLGKLSSVSVLIETLLEHKNNNYAVTEFVQGNKTRRWAIAWSWTDLRPTVSIARGTTAIPKHLLPFPSEYIFTTQSESIDEISSKIDTELSALHVQWLWRKNLATGVGFAMQNVWSRQARRKMQNPDAMAEMGETDETKAALGFKVQVNKDAIDEKGVRVIVRWLKGSDTVLFESFCGMLKRKVEST

SEQ ID NO: 202 - protein, 430 aa, Aspergillus novofumigatus
MRAARNIYKDDVDFTTLALQSPAFAKYVKPNSQLDFSDPDAVRQLTKSLLKRDFDLDVEIPENRLCPPVPNSRLNYILWLQDLLDTTGDQYRDDYDPDRSVLGLDIGTGCCSIYPLLGCTTRPLWDFVATDIDDENVRTARENVTNNGLDSRIRVFKTERKDDLIPLDTKLDVQKLDFTMCNPPFYASREEMIASAEAKERPPFSACTGDEVEMVTEGGEIAFVHRMIEESLHLRERVVWYTSMLGKLSSVSVIVEKLMEHGNNNYAVTEFVQGSKTKRWAVAWSWTDLRPSMKVARGIPGFPKHLLPFPSEFMFEIMNQSIDDLSDKIDKELSSLRIHWTWRKNLATGVGFAMENVWSRQARRKLQNSAGAADMMEIDESAAALGFKIQLKQDRLDEKCVRVVVRWLKGLDSVLFESFCGMLKRKVEGR

SEQ ID NO: 203 - protein, 427 aa, Sistotremastrum niveocremeum
MHPRNPYSKPLDFLALASGFPLLNKFLLQTSERQYVIDFKDSDAQRCLTRALLKRDFEIELKLHEDRLCPPVHIFRSEKVDNTVEEPFVLIDIGTGASSIYPLLGCSIEPSWNFIGTDVDATSLDWASTNVSANRLSHRVSLELANSSGPIFKPLFDDLTLKQVVGFTMCNPPFYSNLEEVAESKQLKEYEPFAVCTGSENEMITAGGEVAFVKKMVVESLELRTRCRWYTSMLGKLSSVIKIVDFLKECEVSNYALTQFVQGTTRRWAIAWSFGLVRLDDAFSRFQSPSLQAWMPPPNNFVHNMPFVEPGDLFASTQSILSAIPGLSHKVKDSDRWTIVISSSGNTWSRAARRKAGSSNAQLSPDAALMMRCEISVSKDERHNAGPSSLILKGRWSWGSDRTLWDSFWHHLTRKLQDCFNTSTNAT

SEQ ID NO: 204 - protein, 325 aa, Antrodiella citrinella
MVFNDPSQLNYVLWLEDILHVTNIAYGLQEAPVVGIDIGTGASAIYPMLGCRKNVHWRFVATELDSSSIEHASANIQANALQDKIALVTYDFTMCNPPFYESRDEVLRSAEAKEVGPNAVCTGADVEMISPGGESAFVSQMVRESIRSGTRCRWYTSMLGKLSSLFAVVKVLNEHEIDNYAITEFVQGQTRRWAIAWSFTNIHLPESIARVANSSLQNIMPKRNTLQRSFKNSRRRPFDILQDVTTSIDGVSSRSTSLIAGEDSVADFVVYASGNTWSRAARRRKQTATAGDDPMHAEDELSQLIGCEATIDFFLKALRIMCGGR

SEQ ID NO: 205 - protein, 429 aa, Aspergillus kawachii
MRASRNIYKDEVDFTALALQSPEFAKYLKANGQLDFSDPDAVRQLTKSLLQRDFELKVEIPENRLCPPVPNRLNYILWLQDLLDTTGDEYRDNYDPDREVIGLDIGTGCCSIYPLLGCSMRPHWRFVATDIDNDNIRTSRDTVSANKLDSRIEIIQTDPKDELIPLDTKLNVDRLDFTMCNPPFYASRDELIASAEAKERPPFTACTGAEVEMVTTGGEIAFITRMIEESLHLRERVIWYTTMLGKLGSVSVLIETLLEHKNNNYAVTEFVQGNKTRRWAIAWSWTDLRPTVSIARGTAAIPKHLLPFPSEYIFTTQSESIDEVSSKIDTELSALHVQWLWRKNLATGVGFAMQNVWSRQARRKMQNPDAMAEMGEIDETKAALGFKVQVKKDAIDEKGVRVIVRWLKGKDSVLFESFCGMLKRKVEST

SEQ ID NO: 206 - protein, 801 aa, Sclerotinia borealis
MSVIKNIYEEDVDFAALGREDPDFGKLLRSNGQLDFSDPKSVQQLTKSLLKRDFGLKLTLPDDRLCPPVPNRFNYIFWLQNLIDTSSDIYTDSYCPDRKVHGLDIGTGASCVYPLLGCTQRPLWTFTGTDIDIKSISFARENVQSNGLQNRVQLIQTKPQGPLIPLDEIGRHSLDFTLCNPPFYTSAEDLVSSASLKQRPPFTACTGSETEMVCEGGEVSFTSRMIKESLKLRNRVQWYTSMLGKFSSLSKIIEQLKEHKVDNYAVTEFVQGNRTRRWAVAWSFNDRRPSMTVSRGCGSLQKSLLPFPAEQTVTINTPDRVAIAAHLRDILSGLVPVWAWESEIFAGVGFCDKAVWSRASRRLRSDTRDEKSKSAHQPLPKDMAFGFKISLSELEADHPGSKVKIRLIYFAKLIQQIEPNPNPNLNPNMTTNMSKSSISHSAVGNESDNASIHLSTPSNLPSKKKNKALNKLSTTVTSKLTRRFLLFSSLPTELRLLIWHAAIPDPLVHELYPSCPTSSPYNFKTKLRSNRRRIPTLLHTCQESRNVALAQYSLMAYDPPPVAESREAVAGITPFYFNPTIDTLFLNCVASIFLDVRWFLLDETPKSIAPMKGWKNVALDSLHMRFVAVVASDLPTPQHRIRELFPDLEKLSIAVDSKNSARRRLRASLRPGHATELVNVGLDDVEGSDEIGVYFEKDFGFTSGTGTRSRTNLAGNATVAEVVDDEDESQQGHNEDNRKPELTMCKVKRDRFYVGLKQDLVYSTQDMISVMGVNGALKHETATELRSLQQTFAPFQDMAGV

SEQ ID NO: 207 - protein, 425 aa, Pseudogymnoascus sp.
MNSDKNIYKKDVNFAELASQDVEFKNILKPNGQVDFSDPDSVQQLTKSLLKRDFGLKLNLPPDRLCPAVPNRLNYLLWIQDLLDTSTPSPSLTDDHDPSRQVVGLDVGTGASAIYPLLGCSHYPTWRFACTDTDPHSFTYARQNITQNNLSNRVRLLQTNPDGPLLPLDDLGLDTIDFTLTNPPFFTSPADLLASSALKSRPPSSVCTGAPSEMVTPGGETAFVARMIAESVPLGQRVRWFTAQLGKLGSVATVVAELRKSGVKNWAVGELVQGRTKRWVVGWSWLGWRPAVRVARGAGGVAGADLPFPSEAVVAKVAVDGEEVGRRVDEAVEELGGKWKWDGEMGVGVGFVARNKWSRAARRKRDNAEEEGDEMAFGFRIYVREVPVDKESPAGTEVEVRWLKGDDSVLFESFCGMIKRKVEAQ

SEQ ID NO: 208 - protein, 429 aa, Aspergillus lentulus
MRAARNIYKDDVDFTSLALQSPAFAKYVKPNGQLDFSDPDAVRQLTKSLLKRDFNLNVEIPENRLCPPVPNRLNYIQWLQDLLDTTGDQYRDDYDPDRFVLGLDIGTGCCSIYPLLGCMTRPLWDFVATDIDDENVRNARENVINNELGGRIRVFKTEPKDDLIPLDTKLDVQRLDFTMCNPPFYASREEMVASAETKERPPFSACTGAEVEMVTEGGEIAFVYRMIEESLRLRERVVWYTSMLGKLSSVSVIVEKLMEHGNNNYAVTEFVQGSKTRRWAVAWSWTDLRPSMNVARGIPGFPKHLLPFPSEFMFEIMNQSIDDIGDKIDKELCSLRIHWIWRKNLATGVGFAMENVWSRQARRKLQNSARAADMMEIDDSAAALGFKIQLKQDRLDEKCVRVVVRWLKGLDSVLFESFCGMLKRKVEGR

SEQ ID NO: 209 - protein, 429 aa, Aspergillus thermomutatus
MRAARNIYKDDVDFTTLALQSPAFAKYVKPNGQLDFSDPDAVRQLTKSLLKRDFNLNVEIPDNRLCPPVPNRLNYILWLQDLLDTTGDQYRDDYDPDRSVLGLDIGTGCCSIYPLLGCTTRPQWDFLATDIDDENVRTARENVTINEYDDRIRVFKTEPKDDLIPLDTKLDVQRLDFTMCNPPFYASREEMIASAQAKERPPFSACTGDEVEMVTEGGEIAFVYRMIEESLRLRERVVWYSSMLGKLSSVSVIVEKLMEHGNNNYAVTEFVQGSKTKRWAVAWSWTDLRPSMKVARGIPGFPKHLLPFPSEFMFEITDQSIDNISDKIDKELSNLRIHWTWRKNLATGVGFAMDNVWSRQARRKLQNSAATADTMGIDESTAALGFKVQLKQDRIEEKCVRVVVRWLKGSDSVLFESFCGMLKRKVEGR

SEQ ID NO: 210 - protein, 432 aa, Coccidioides immitis
MDSPRNIYRQDVDFRSLALEDPDFAKFLKVNGQLDFNDPGAVRQLTKSLLRRDFKLNVELSDDRLCPPVPNRFNYVLWLQDLIDTTNDDYRGGYDPEREVVGLDIGTGASCIYPLLACAQRPKWMFVATDINDKNFQYAQENVKRNNLQSRIRVVKTTAEDPLIALGDKVPFERLQFTMCNPPFYESEEEMLASASLKHRPPNSACTGAPVEMVTAGGEESFVQRIIDESLKLRNKVQWYTSMLGKLSSVTKLIEKLLESGNQNWAVTEFVQGSKTRRWAIAWSWRDLRPTMAVARNISSIPKHLLPFPSEFTFHPEFESITFLIHKIDDEMKSLQMLWSWDQHVSRGLGFAMENVWSRQARRKRQHLIVEGQTAESLSKSIDESKAALGFAVLVKQTGIKNVDVIVRWIKGFDSVLFESFCGMLKGKLEPR

SEQ ID NO: 211 - protein, 433 aa, Penicillium nordicum
MESARSLYKNDIDFAALALQSPDFTKHLNKNGQLDFTDPAAVRQLTTTLLQQDFHLKVEIPEDRLCPPVPNRLNYILWLQDLLDSTAGGLHEGYDRDRDVFGLDIGTGCIGIYPLLGCATRPRWNFVATDIDSNNIRTSQHNVALNNLESRIQVVHSDPTGPLFPLDKLGCQTLDFTMCNPPFYTSSAELKQSAEQKEREPFSACTGAEMEMVTSGGEVAFVKQMIDESLQMRDRIQWYTSMLGKLSSINVLIEALIKHGVTNFAVTEFEQGSKTKRWAVAWSWGDRRPAMHIARGIPGCPKSLLPFPTDYTFTMPPGTSIDATTATINAELSSLPWFWAWDQTCSSGTGFAAENVWSRFARRKMKLAGEEDAARLKVIPAQVALGVRLQIRLVRGQKPDEEEVRVLVRWAQGTDTVLFESFCGMVKRKLESK

SEQ ID NO: 212 - protein, 425 aa, Pseudogymnoascus sp.
MNSDNNIYKEDVDFAGLASQDVEFKNILKPNGQLDFSDPESVQQLTKSLLNRDFGLKLTLPPDRLCPAVPNRLNYLLWIQDLLDTSAPNPSLTDTHDPSRPVIGLDVGTGASAIYPLLGCKHYSTWRFACTDTDPHSLTYARQNITQNNLSNRIRLLQTEPEGPLLPLDDLGLDKIDFTLTNPPFFTSPDDLLASATLKSRPPSGVCTGAPSEMVTPGGETAFVARMIAESVPLGQRVRWFTAQLGKLGSVATVVKELRERGVKNWAVGELVQGRTKRWVVGWSWVGWRPAVRVARGASGVAGGDLPFPSEVVVTKVAVDGKEVGRRVDEAARGLGGRWKWDGERGVGMGFVARNTWSRAARRKAGSIEEEGDEMAFGFRIYVKEVPADARKSAETEVVVRWLKGDDSVLFESFCGMIKRKVEAQ

SEQ ID NO: 213 - protein, 424 aa, Phialocephala subalpina
MTQIKNIYEDEIDFATLALQDAEFAKILKSNGQLDFSNPESIQQLTKSLLKRDFKLKISLPPDRLCPPVPNRLNYVLWTQRLLDTTSDSYNDVFDPEREVLGLDIGTGASCIYPLLGCSQRLQWRFAGTDIDEKSLQFARQNVQDNGLQNRIKLLKTLSTDSLLPLDKMGFENIDFSMCNPPFYESKAEMLTSAASKQRPPFTACTGSENEMVTTGGEIAFVSRMIGESLVLKNRVQWYTSMLGKFSSVGVIVQKLRENGVDNYAVTEFVQGSKTRRWAVGWSFDDLRPAMSVARGVSSLQKSSMPFPSEYIIPSNNDASTVGQQVSETLSQLPLKWQWREPISTGIGFSSKAVWSRAARRHMAKVKDESMGEEDMALGFKIHVEQVPGGQPGSKIIIRWLKGHDSVLFESFCGMMKRKLEEKR

SEQ ID NO: 214 - protein, 459 aa, Trametes pubescens
MHPRNPYQSPPDFLALALSHPALKPQYAPPCTWVFAYKRLTECGCCSVIRTAKGATIDFKDEAAQRLNYILWLEDAMAAVTLALGEDPTRPVRGIDVYVSPGVLHTIRPTLLDCNDVLTGCSYRGTGASAIYPLLGCRTRANWSFVATEIDALSLNAARENVRANGLKGRISIREADSAGPVLGPLFQSDGTPYDFTMCNPPFYGSREEVQQSAEGKEYGPNAVCTGADVEMITPGGEAAFVGRMVEESTRAQNLCRLFSSMLGKMSSLTHVVQTLRDNKIENYAVAELVQGQTRRWVIAWSFADVRLPDTLARLSHHGTQHLMPARNTLNQPLPPGRSLSEAASLARAVLSAIDGLSVRSCAPSESLEILDVAVSAAGCTWSRAARRKKRDAMDADGAPQLVCRVRCEERPRAGGAEAGVQLVFDWLKGSDRGLFEGFASHVERKVVAGLSSSSQRNG

SEQ ID NO: 215 - protein, 432 aa, Coccidioides posadasii
MDSPRNIYRQDVDFRSLALEDPDFAKFLKVNGQLDFNDPGAVRQLTKSLLRRDFKLNVELSDDRLCPPVPNRFNYVLWLQDLIDTTNDDYRGGYDPEREVVGLDIGTGASCIYPLLACAQRPKWMFVATDINDKNFQYAQENVKRNNLQSRIRVVKTTAEDPLIALGDKVPFERLQFTMCNPPFYESEEEMLASANLKHRPPNSACTGAPVEMVTAGGEESFVQRIIDESLKLRNKVQWYTSMLGKLSSVTKLIEKLLESGNQNWAVTEFVQGSKTRRWAIAWSWRDLRPTMGVARNISSIPKHLLPFPSEFTFHPEFESITFLIHKINDEMKSLQMLWSWDQHASRGLGFAMENVWSRQARRKRQHLIVEGQTAESLSKSIDESKAALGFAVLVKQTGIENVDVIVRWIKGFDSVLFESFCGMLKGKLEPR

SEQ ID NO: 216 - protein, 429 aa, Aspergillus welwitschiae
MRALRNIYKDEVDFTALALQSPEFAKYLKSNGQLDFSDPDAVRQLTKSLLQRDFELKVEIPENRLCPPVPNRLNYILWLQDLLDTTGDEYRDNYDPDREVIGLDIGTGCCSIYPLLGCSMRPHWRFVATDIDNDNIRTSRDTISKNKLDSRIEIIQTDPKDELIPLDTKLNVDRLDFTMCNPPFYASRDELIASAEAKERPPFSACTGAEVEMVTTGGEIAFITRMIEESLRLRERVIWYTTMLGKLSSVSVLIETLLEHKNNNYAVTEFVQGNKTRRWAIAWSWTDLRPTVSIARGTTAIPKHLLPFPSEYIFTTQSESIDEVSAKIDSELSALHVQWLWRKNLATGVGFAMQNVWSRQARRKMQNPDAMAEMGEIDETKAALGFKVQCKKDAIDEKGVKVIVRWLKGRDTVLFESFCGMLKRKVENN

SEQ ID NO: 217 - protein, 428 aa, Marssonina coronariae
MSQLGMIYKDDIDFATLALQDGEFAKALKPNGQLDFSNPESVCQLTKSLLKRDFALKISLPPDRLCPPVPNRVKYILWIQGLLDSTSDSYTDAYDPEREVLGLDVGTGASCIYPMLGCAQRPNWRFAGTDVDDKSFGFAKQNVLANGLQSRIKLLQTQPDGPLLPLDKMGFEAIDFSMCNPPFYASTDELLSSAASKQRPPLTACTGSESEMVTAGGEVAFVSRMIDESLVLKDRVQWYTSMLGKFSSIDVLLKKLKENNIDNYAVTDFVQGNKTRRWGVAWSFGDLRPSMAVARAVGSLQKNLLPFPGEYLINSSRNQGEVGQHINFTLSQLPLRWVWKAKISTGIGFSENAVWSRVARRNASKVLGKGVDEDDEDDMAFGFRVHVDGIPGGAGGSRATVRWLKGHDSVLFESFCGMLKRKVGEGLR

SEQ ID NO: 218 - protein, 449 aa, Helicocarpus griseus
MDTARNIYKNDVDFAALGLQYPDFAKHLRQNNQLDFTNPDAVQQLTRCLLRRDFGLHVDLPDDRLCPPVPNRFNYILWLQDLLDSTGETYSDAYDREREVFGLDIGTGASCVYPLLGCALRPKWRFIATDIDAKNLKYARDNVKRNILQDRIQIVENTSSNGLIPFKDIDTLKPRLDFTMCNPPFYESREELISSAKAKQRPPFSACTGAEVEMITVGGEVEFVARMIRESIQLRDRVKWYTTMLGKFSSVATLINLLHEEGNRNWAVAEFVQGSKTRRWGIAWSWMDYRPTADAARPHGQSIPKNLLPFPPEFTFHCSPSNQISSIIKTINDTLTALDVYWRWNTSTSTGLGFAMGNAWSRHARRQKKKLAVEAGADTNTSQSGGRGKLDNGDFVPGKQDKEAELGFKVSVRGTMDGQSEVTVRWVKGFDAVVFESFCGFLKRKVEGR

SEQ ID NO: 219 - protein, 284 aa, Protomyces lactucaedebilis
MHPRSCFATPPDLKLLAQAFPDLRPLYACLLIDGSYLDYNDPNALRAVTRCYFKHFFGLTVAIPVDRLCPTLGNRLNYVLWLEDLVSETRLDDKPVVGLDVGTGATAVYPLLTIAQNKQWRMLATESDQRSFEAARDNLKQNSLSERIILLKADVDAPILLQHNAVISQPLNFVMCNPPFYTDEEEIATSAKLKGGAKSAAFIGSPSEMITPGGEVAFTLRLFEESKALQKRIQWYTTMLGKLSSVEQLVGHLRSAGINNYVLHELTQGKTRRWVVGWSFAPQR

SEQ ID NO: 220 - protein, 430 aa, Aspergillus aculeatus
MSASRNIYKDDIDFTALALQSPEFAQYLKSNGQLDFTDPDAVRQLTQSLLQRDFDLKVNIPDKRLCPPVPNRLNYIFWLQDLLDTTGDKHQDSYDADRKVVGLDIGTGCCSIYPLLGCSMRTGWSFFATDIDEGNIESSRANVSANGLDSRITVVRTDSEEKLIPLDTKLKVDRLDFTMCNPPFYASRDEMIASAEAKDRPPFSACTGAEVEMVTAGGEVAFISRMIEESLQLRNKVLWYTSMCGKLSSISVLIEKLIEHGNNNYAVTEFVQGNKTKRWALAWSWTDIRPTAAVARGIPTIPKHLLPFPSEYTFTATTESIDEVATTVDAELGALPLQWLWRKSLATGVGFAMQNVWSRQARRKLRNPDAMADQPPVEESKAALGFRVQLKKEVSDDKRVKVIIRWIKGTDTVLFESFCGMLKRKIDSKP

SEQ ID NO: 221 - protein, 463 aa, Psilocybe cyanescens
MHERNPYRIPPDFAVLCDSYEKLKPYIISDPASSRTTIDFKDEEAQRRLTEAIMHRDFGVTLHIPLTRLCPPVPNRQIRRLNYALWMQDIVRAHEVALGSQLRTRHLNVHPPKRDRIDRDLSFSFVQAGTDLELDDESYASAQHNVSQNNMQSRIHIEKASPDGLILFPLECNHDSFTFTMCNPPFYGSADEVAQSAQEKELPPNAVCSGAEVEMIYPDGGEEGFVGKMVEESERFQTRCKWYTSMLGKMSSVVTIVGILRQRSISNYAITEFVQGQTRRWAIAWSFTDTRLPDSLARIPSILPKHALYSCMPPRNTLNQAFPGYTIQDVHAKLGDTLRGVNGVSCNEINSMGTNSNPFLVEAQENTWSRSARRSRANNNSRKPSSALEEGMTTTAPDPALTCSCRVNIDTGLSEEDGGEPLCAIEIQWIYGKDRALFESFAGHVGRKVGSSLRTEGKGIVGF

SEQ ID NO: 222 - protein, 425 aa, Pseudogymnoascus verrucosus
MDSDKNMYKKDVDFTELASQDAEFKNILKPNGQVDFSDPESVQQLTKSLLKRDFGLKLDLPPDRLCPAVPNRLNYLLWIQDLLDTSTPTPSLDDTHDPTRPVIGLDVGTGASAIYPLLGCSHYPTWRFACTDTDPHSFTFARKNITQNNLSNRVRLLQTEPDGPLLPLDDLGLDTIDFTLTNPPFFTSPADLIASASLKSRPPSSVCTGAPSEMVTPGGETAFVARMIAESIPLGQRVRWFTAQLGKLGSVSTVIKELKEKGVKNWAVGELVQGRTKRWVVGWSWVGWRPAVRVARGAVGVAGGDLPFPSEAVAVKVVVEAEKVGRRVDEAVAGLGGKWKWDADGGVGVGFVARNTWSRAARRKGGGMEEEGDEMAFGFRIYVRGVPKEEKKPAETEVVVRWLKGDDSVLFESFCGMIKRKVEAQ

SEQ ID NO: 223 - protein, 420 aa, Cadophora sp.
MSTMSAPTNIYKDEIDFATLALQDADFAKILKTNGQLDFSNPESVQQLTKSLLNRDFGLKISLPPDRLCPPIPNRLNYILWIQSLLDSTSDSYRDTYDVEREVLGLDIGTGASCIYPLLGCAQRPKWRFAATDIDEKSLQFAKQNVQDNGLQSRIKLLQSQPEEPLLPLDKMGFESIDFSMCNPPFYTSTSEMLSSAALKQRPPFTACTGSANEMVTLGGEVSFITRMIDESLILKDRVQWYTSMLGKFSSIEPLVKKLREKGVDNYAVTEFVQGSKTRRWGLAWSFEDLRPSMQVARSVGSLQKALLPFPGEYLTASNNNQTEVGELVNETLSQLPLKWMWKSKLSIGIGFSDKAVWSRVARRHVSQGQDGAMKDDEDEGDMAFGFKIQVEANPGGVAGSRITIRWLKGHDRVLFESFC

SEQ ID NO: 224 - protein, 396 aa, Phycomyces blakesleeanus
MTKRTADIAKLDDLGGSIHGMHPRNQYKNNPPNFKQLAKECPELQPFVCGLESNPYIDFKNPEASRALTIALLERDFGLQVDFPLDRLCPTVPNRLNYILWLQDLLKETMQDKPDHILGMDIGVGASCIYPLLGCVSDPTWSFIGTDIDQVSIEYAQKNVERNQLQDRITLIHNTDPNLIFLWDKIPLNSRFAFSMCNPPFYESEDEIKDNSQAKLLEPSAICTGTKGEMITKGGEYGFIERMIKESILHKGRIKWYTSMIGQKKTIKPIVNTLKDLNINNYVVTEFNQGKTKRWAIGWSFDTQRAVDARSLDFYRPKSQFTIQLPKDISHVHSKTIDILQDLAIKFNQEDGHHIILEGSPKANTWSRAARRKKNCVTPRDCDGLFGFRLMLAEQN

SEQ ID NO: 225 - protein, 465 aa, Paracoccidioides lutzii
MDTTRNIYKNDVDFAALAFQYPDFAKHLKQNNQLDFSNPDAVQQLTKSLLKRDFGLDVDLPDDRLCPTVPNRLNYILWLQDLIDFTTENYSDVCDQEKDVYGLDIGTGASCIYPLLGCALRPRWRFAATDIDSKNLKYARDNVKKNELDSRIHVIETTSSCPLIPFQDINIPQARSRLDFTMCNPPFYESREELISAAEMKQRPPFTACTGAEVEMITTGGEVEFVTRLIKESMQLRDRVQWYTSMVGKFSSVATLVNTLHDEGNKNWAIAEFVQGTKTRRWGIAWSWMDYRPSTDIARPHGQSIPKHLLPFPSEFTICCPPSTSLSRTIETINSALTALDMSWNWNTETSTGLGFAMGNVWSRHARRQRKKEQAVEVGTAPRTGSENTADTTRYYEGEGGEGTGDTHGDFIPGVQDKRAKIGLKVSMRRTMEGKINVVVRWVKGFDSVVFESFCGFLKRKVEGR

SEQ ID NO: 226 - protein, 469 aa, Emmonsia crescens
MDITRNIYKNDVDFTALALQYPDFAKHLKQNNQLDFTNPDAVQELTKSLLKRDFGLHLDLPDDRLCPPVPNRFNYILWLQDLVDSTAESYSDGYDQEREVIGLDIGTGASCIYPLLGCALRPKWRFAATDIDAKNLKYARDNVQRNKLDSRIQVVENTSANALIPLKDINIPESKSRLDFTMCNPPFYESRDELISAAKAKQRPPFSACTGAEVEMITAGGEVEFVTRMIRESVQQRGRVQWYTSMVGKFSSVATLVNILHEAGNKNWAVTEFVQGSKTRRWAIGWSWMDYRPAADTARPHGQSIPKHLLPFPSEFTFNCPPSTPLSATIEVVNSTIAALDVYWRWNSSTCTGLGFARGNAWSRHARRQRMKQALEAASVLPTSSGATTLATADNSQGPGQSEGDDDDDNKQGEFTAGKQDKGAELGFKVSVRGNMKGQAEVTVRWVKGFDAVVFESFCGFLKRKVEGR

SEQ ID NO: 227 - protein, 429 aa, Aspergillus tubingensis
MRASRNIYKDEVDFTALALQSPEFAKYLKSNGQLDFSDPDAVRQLTKSLLQRDFELKVEIPENRLCPPLPYRLNYILWLQDLLDTTGDEYRDNYDPDREVIGLDIGTGCCSIYPLLGCSMRPHWRFVATDIDNDNIRTSRDTVSANKLDSRIEIIQTDPKDELIPLDSKLNVDRLDFTMCNPPFYASRDELIASAEAKERPPFTACTGAEVEMVTTGGEIAFITRMIEESLHLRERVIWYTTMLGKLSSVSVLIETLLEHKNNNYAVTEFVQGNKTRRWAIAWSWTDLRPTVSIARGTTAIPKHLLPFPSEYIFTTQSESIDEISSKIDTELSALHVQWLWRKNLATGVGFAMQNVWSRQARRKMQNPDAMAEMGETDETKAALGFKVQVKKDAIDEKGVRVIVRWLKGSDTVLFESFCGMLKRKVEST

SEQ ID NO: 228 - protein, 433 aa, Penicillium patulum
MESARSLYKNGIDFAALALQSRDFAKHLNPNGQLDFSDPAAIRQLTTTLLQQDFHLKVEIPKDRLCPPVPNRLNYILWLQDLLDSSAGGLYERYDQDREVVGLDIGTGCIGIYPLLGCATRPRWNFVATDIDSNNIRTSQHNVALNNLESRIQIVHSDPNGPLFPLEKLGRQTLDFTMCNPPFYTSAEDLKKSAEQKERDPFSACTGVEVEMVTSGGEIAFVKKMIEESLQLRDRIQWYTSMLGKLSSINVLVEMLLKHENHNFAVTEFEQGSKTKRWAIAWSWGDRRPAMNIARGIPGCPKSHLPFPSDFTFTLPPDTSIDTAIATINAELSSLPWFWSWDQARSAGMGFAGENVWSRFARRKMKLAGEEGAAKLKMIPAQVALGVRVQIRLVRGQKPDEREVRVLVRWAQGTDTVLFESFCGMVKRKLESK

SEQ ID NO: 229 - protein, 425 aa, Pseudogymnoascus sp.
MNSDKNIYKKDVNFTELASQDVEFKNILKPNGQVDFSDPESVQQLTKSLLKRDFGLKLVLPPDRLCPAVPNRLNYLLWIQDLLDTSTPTPSLTDTHDPTRPVIGLDVGTGASAIYPLLGCAHYPTWRFACTDTDSHSFTFARQNITQNNLSNRIRLLQTDPDGPLLPLDDLGLDTIDFTLTNPPFFTSPADLLASSALKSRPPSSVCTGAPSEMVTPGGETAFVARMIAESVPLGERVRWFTAQLGKLGSVATVVAELRKRGVKNWAVGELVQGKTKRWVVGWSWAGWRPAVRVARGAGGVAGGDLPFPSEAVAVKVVLEEKEVGRRVDEAVEGLGGRWKWDADSGVGVGFVARNTWSRAARRKGGSVEDEGDEMAFGFRVYVREVPGEGEGPAATEVVVRWLKGDDSVLFESFCGMIKRKVEAQ

SEQ ID NO: 230 - protein, 430 aa, Penicillium decumbens
MESARSLYKDGVDFAALSLQSSEFAKHLNSNGQLDFNDPASVRALTISLLQQDFRLKVELPEDRLCPPVPNRLNYIIWLQDLLDSTAGTIEEGYDPKRDVVGLDVGTGCCSIYPLLGCSLRPQWKFLATDIDENNVRTAEHNVKLNGLESRIQIVKTDPKGPLFPLDKFGQSRIDFTICNPPFYASQEEMMQSAEAKSEKPSQTCTGADMEMVTSGGEVAFVTRMIKESMQLRNQVQWYTSMLGKLSSISVLVETLMKNNNHNYAVTELVQGKTKRWALAWSWGERRPKMSVARGIPGFPKHLLPFPVDYTFTLPTTSIDAAIASLNGELDSLSWYWAWDRKLSAGVGYTSENVWSRQARRKMKLAGQEGMKMTTNPGEVALGVRVQLRLVHGKTPDTKGEVQVFIRWIQGSDSVLFESFCGMLKRKMEA

SEQ ID NO: 231 - protein, 433 aa, Penicillium digitatum
MESARGLYKNDIDFAALALQSRDFAKHLKLNGQLDFTDPAAVRQLTTTLLQQDFHLKVEIPEDRLCPPVPNRLNYILWLQDLLDSTAGGLKEGYDRDREVVGLDIGTGCVGIYPLLGCATRPGWKFLATDIDSNNIRTSQHNVALNNLESRIQIVSSDPTGPLFPLEKLGRQRLDFTMCNPPFYTSSNELKQSAEQKEREPFSACTGAEVEMVTRGGELAFVKQMIDESLRLRERIQWYTSMLGKLSSINVLVETLIKHGITNFAVTEFEQGSKTKRWAVAWSWGDRRPAMSIARGIPGCPKSLLPFPADYTFTLPSAASIDTATATINAELSSLPWFWVWDQTHSAGTGFAAENVWSRFARRKMKLAGEEGAAKLKVIPAQVALGVRLQIRLVRGEKPEKKEVKVLVRWAQGTDTVLFESFCGMVKRKLESK

SEQ ID NO: 232 - protein, 465 aa, Paracoccidioides brasiliensis
MDTSRNIYKNDVDFAALALQYPDFAKHLKQNNQLDFSNPDAVQQLTKSLLKRDFGLNVDLPDDRLCPAVPNRLNYILWLQDLIDFTTENYSDVYDQERVVYGLDIGTGASCIYPLLGCALRPRWRFAATDIDSKNLKYARDNVKKNELDSRIHVIETTSSCPLIPFQDINIPQARSRLDFTMCNPPFYESREELISAARAKQRPPFSACTGAEVEMITTGGEVEFVTRLIKESMQLRDRVQWYTSMVGKFSSVATLVNTLHDEGNKNWAIAEFVQGTKTRRWGIGWSWMDYRPSTDIARPRGQSIPKHLLPFPSEFTICCPPSTSLSRTIEKINSALTVLDMSWNWNTKTSTGLGFAMGNVWSRHARRQKEKEQAVEVGTAPRTGSENTADTTRYHEGEGGQGTGDTHGDFIPGDQDKGAKIGLKVSMRRTMKGEINVVVRWVKGFDSVVFESFCGFLKRKVEGR

SEQ ID NO: 233 - protein, 429 aa, Glarea lozoyensis
MSGLTNIYKDDVDFAALALQDADFAAVLKANGQLDFSNPESVQQLTKALLKRDFGFKLSLPPDRLCPPVPNRLNYLLWIQELLSTTGENYGDEFDPEREVLGLDVGTGASCIYPLLACSKLGKWRFAGTDVDEKSLQFARENVKLNGMERRIKLLKTERSGPMIPLDGLGFENIDFTICNPPFYISTPQMIQSASQKLRQPFTACTGSESEMVTEGGEIAFVSRMITESLVLRDRVQWYTSMLGIFSSVSILIQKLKANGIENYAVTEFVQGKKTRRWGLAWSFEDLRPRMAVARGVGSVTKALLPFPSEYCINFDNDTSVETISKHINDILSELPLNWMWKASISTGLGFCQKAVWSRAARRQAVQKDKDMNDDDDDDAALGFKIYVEENVEDEAGIRVTIRWLKGRDSVLFESFCGMLKRKLDELST

SEQ ID NO: 234 - protein, 432 aa, Penicillium rubens
MESARSLYKNDIDFAALALQSRDFAKHLKPNGQLDFTDPAAVRQLTTTLLQQDFHLKVDIPEDRLCPPVPNRLNYILWLQDLLDSTAEGLHEGYDRDREVVGLDIGTGCIGIYPLLGCATRPRWNFIATGDIDSNNIRTSQHNVALNNLESRIRIVHSDPNGPLIPLEKLGCQKLDFTMCNPPFYTSPNELKQSAEQKEREPYSTCTGAEVEMVTSGGEVAFVKRMIDESLQLRDRVQWYTSMLGKLSSINALVEMLIKHGVTNFAVTEFEQGSKTKRWAVAWSWGDRRPAMNIARGIPGCPKSLLPFPADYTFTLPPGTSIDTATATINAELSSLPWFWTWDQARSAGTGFAAENVWSRSARRKMKLAGEEHAARLKVIPDQVALGVRLQIRLVRGQKPEEKEVKVLVRWAQGTDTVLFESFCGMVKRKLE

SEQ ID NO: 235 - protein, 333 aa, Ceriporiopsis subvermispora
MPAASIQLSPAVSSVYSPPPEEPLLTIRMTPHNGLPTVREILARNMQLRLALVQEIDGSFAPAGLQHQVDVAHRPTVPSAKVPNRLNYILWLEDVVKTVRLAEPDAFRNGVQGLDIGTGASAIYPLLGCRTDPTWTFTATDIDSKSFQFARSNIATNGLDDRIRVVQSDPTGAILAPLMENNLELQVSEEIGDEAVRYDFTMCNPPFYSSREDIAQSAETKEYGPNAQICTGAEVEMITAGGEMTFVCQMVRESSKSRCRCRWYTSMLGKMSTLMEVVALLRELNIDNYACTELVQGQTRRWVVAWSFGDIRLPDALESKSAKRNARTELAMA

SEQ ID NO: 236 - protein, 430 aa, Aspergillus violaceofuscus
MSASRNIYKDDIDFTALALQSPDFAKYLKSNGQLDFTDPDAVRQLTKSLLRRDFDLKVDIPDKRLCPPVPNRLNYILWLQDLLDTTGDKYQDSYDADRKVVGLDIGTGCCSIYPLLGCSMRPGWSFFATDIDEGNIESSRANVSANGLDSRITVVRTTSEERLIPSDTKLKVDRLDFTMCNPPFYASRDEMVASAEAKDRPPFSACTGAEVEMVTAGGEIAFISRMIEESLQLRDKVLWYTSMCGKLSSISVLIEKLVGHGNNNYAVTEFVQGNKTKRWALAWSWTDLRPTAAVARGIPTTPKHLLPFPSEYTFTATTDSIDEVATTVDEELGALPLQWLWRKSLASGVGFAMQNVWSRQARRKLRNPDAMADQPPVEESKAALGFRVQLKKGVSDDQGVKVIIRWIKGTDTVLFESFCGMLKRKIDSKQ

SEQ ID NO: 237 - protein, 433 aa, Penicillium roqueforti
MEYVRSLYKNDVDFAALGLQSRDFAKHLKQNGQLDFTDPAAVRQLTTTLLQQDFDLKVEIPEDRLCPPVPNRLNYILWLHDLLDSTAGGLHEECDRDREVVGLDIGTGCIAIYPLLGCATRPLWKFVATDIDSNNIRTSQHNVALNNLRSRIQIVNSDPNGPLFPLEKLGHQTLDFTMCNPPFYASPNELKQSAEQKERDPFSTCTGAEVEMVTHGGEVAFVKQMIDESLQLRDRIQWYTSMLGKLSSINVLVEMLIKHGITNFAVTEFEQGSKTKRWAVAWSLGDRRPAMNIARGIPGCPKSLLPFPADYTFTLPPGTSIDTATATIDTELSSLPWFWTWNQTRSAGTGFASENVWSRFARRKMKLAGEEGAAKFKAIPDQVALGVRLQIRLVRGQKPDEREVKALVRWAQGTDTVLFESFCGMVKRKLESN

SEQ ID NO: 238 - protein, 428 aa, Marssonina brunnea
MSQKSIYKGDIDFATLALQDRDFAKVLKPNGQLDFSNPESVQQLTKSLLRRDFGLEITLPPDRLCPPVPNRLNYILWIQSLLDSTSDSYTDRYDPEREVLGLDVGTGASCIYPLLGCSQRPNWRFAGTDTDDRSFQFAKKNVQDNGLQTRIKLLQTQPDGLLLPLDQMGFDSIDFTMCNPPFYTSTTELLASAASKQRPPFTACTGSESEMVTPGGEVTFASRMIDESLVLKDRVQWYTSMLGKFSSIEVLVKKLQGSGVDNYAVTEFVQGSKTRRWAIGWSFEDLRPGMGIARGVGTLQKGLLPFPGDYVITSRSNQADVGQKINTILGQLPMKWRWKSTIYTGIGFSGKAVWSRAARRHVTKSQDAAMEDDSDEEEMAFGCKVQVEANAGGVGGSKITIRWLKGHDSVLFESFCGMLKRKIEEEVK

SEQ ID NO: 239 - protein, 425 aa, Pseudogymnoascus sp.
MNSDKNIYKKDVNFTELASQDAEFKNILKPNGQVDFSDPESVQQLTKSLLKRDFGLKLDLPPDRLCPAVPNRLNYLLWIQDLLDTSTPTPSLDDTHDPSRPVIGLDVGTGASAIYPLLGCSHYPTWRFACTDTDPHSFTFARKNITQNNLSSRVRLLQTDPDGPLLPLDDLGLDTIDFTLTNPPFFTSPSDLLASATLKSRPPSSVCTGSPSEMVTPGGETAFVTRMIAESIPLGQRVRWFTAQLGKLGSVSTVVKELKEKGVKNWVVGELVQGRTKRWVVGWSWVGWRPAVRVARGAVGVTGGDLPFPSEAAAVKVVVEAEEVGRRVDEAVAGLGGKWKWDADSGVGVGFVARNTWSRAARRKGGGMEEEGDEMAFGFRIYVREVPGEGEKPAETEVVVRWLKGDDSVLFESFCGMIKRKVEAQ

SEQ ID NO: 240 - protein, 434 aa, Talaromyces marneffei
MDSSRNIYRREIDFRALALTSPEFAKRLKSNDQLDFSDPDSVRQLTKSLLERDFKLVVDLPDDRLCPPIPNRFNYILWLQDLLDTSSRTGTDQYDLNRQVLGLDIGTGCCAIYPLLGCSSRPRWRFVATDIDGSNISSSRKVVSDNKLDDRITILETKPNDPLIPIDRLDVDRLDFVMCNPPFYESEEELVSSARAKSRPPFSACTGAAVEMITPGGEVAFIESLVQQSLALKTHILWYTSMFGKLSSVSVVVQKLLDSGINNWAVTEFVQGKGTRRWAVGWSFSDWRPRSDVSRGITSLPKHLLPFPSHYNFEILGRHTGSLEHIINKINIEFSPLRYFHYTWYSKQSCIGYAKEDIWSRKARRKFAREQHDGETISHDEKALDVVTAALGFRIDLSLQADHSVDVVVRWIKGSDQVLFESFCGMLKRKLTEE

SEQ ID NO: 241 - protein, 269 aa, Sphaerobolus stellatus
MITASNRLLTQALLKRDFNLTLSIPDGRLCPPVPNRLNYVLWIQDILFPFHRNVPKEPICGLDIGTGASAIYPLLACSLPNAERWTFVGTEIDALSAQYAVQNVTANHLEPKITIQHVSRSATDESCVILIPFNDPKARFDFTMCNPPFYGSAEEIAESAEMKNLPPNSVCTGAETEMITLGGEKAFVLQMIHDSMRDNVRTRWFTSMVGKLSTIGEIVQHLRALKIENYALTQFVQGTTRRWAIAWSFGIDRLPDVSGSFHLSIPYMT

SEQ ID NO: 242 - protein, 441 aa, Pseudogymnoascus sp.
MDSDKNIYKKDVDFTELASQDAEFKRIVTIISNIPILKPLSLSLKPNGQVDFSDPESVQQLTKSLLKRDFGLKLDLPPDRLCPAVPNRLNYLLWIQDLLDTSNPSPSLTDTHDPSRPVIGLDVGTGASAIYPLIGCAHYPTWRFACTDTDPHSFTFARQNITQNNLSTRIRLLQTDPDGPLLPLDDLGLDTIDFTLTNPPFFTSPSDLLASATLKSRPPSSVCTGAPSEMVTPGGETAFVGRMIAESVPLGQRVRWFTAQLGKLGSVATVIAELKKSGVKNWAVGELVQGRTKRWVVGWSWVGWRPAVRVARGAVGVTGGDLPFPSEAVAVKVVVEAEEVGRRVDEAVGGLGGKWKWDADSGVGVGFVARNTWSRAARRKGGSVEEEGDEMAFGFRIYVREVSGEGEKPAETEVVVRWLKGDDSVLFESFCGMIKRKVETQ

SEQ ID NO: 243 - protein, 429 aa, Aspergillus steynii
MRSARNIYKDDVDFTTLALQSPDFAKYVKSNGQLDFSDPDAVRQLTKSLLKRDFDLTVDIPGNRLCPPVPNRLNYILWIQDLLDATGDEYRGDFDPDRKVVGLDIGTGCCCIYPLLGCASRPQWNFVATDIDNDNIQSSLRAVNANSLESRIRIMKTDPKDGLIPLHTKLGVDRLDFTMCNPPFYASRNELISSAEAKERPPFSACTGAEVEMVTDGGEIAFVSRMIEESLELREKVLWYTSMLGKLSSVSVLVESLIELKNHNYAVTEFVQGNKTKRWAIAWSWADLRPSVNVARSISNFPKHLLPFPSEYVFDIPSGSIDAVSEKLDVELSSLPIQWLWRQNLATGVGFAMENVWSRQARRKMQGSAGVAHKAEIDEAKAALGFKISVKKEGIEDKGVRVVVQWLKGTDSVLFESFCGMVKRKTEGR

SEQ ID NO: 244 - protein, 429 aa, Aspergillus pseudonomiae
MRAIRNNIYKDDVDFATLALQSPDFAKYLKPNNQLDFSDPDAVRQLSISLLQRDFGLNVHIPENRLCPPVPNRLNYILWLQSLLDTTGDEYRDNYDPDRKVIGLDIGTGCCSIYPLLGCSVRPQWNFVATDIDDDNIRTSQEAVSGNRLESRIRIVKTDSNGDLIPLEKLEVEGLDFTMCNPPFYTSREELVSSAQAKERPPFSACTGAEVEMVTQGGEVAFVSRMIEESLRLRQKVLWYTSMLGKLSSVSILVEKLIGHGNHNYAVTEFVQGSKTRRWAIAWSWGDLRPSVDVARSITTFPKHLLPFPSEYIFDIPNASIDDASQKLDKELTSLPLQWLWRYNLAVGVGFAMENVWSRQARRKMKGSASAMQNIEVDDSSAALGFKVHLRKEGIEEKGVRVLIRWLKGTDSVLFESFCGMVKRKLEGR

SEQ ID NO: 245 - protein, 433 aa, Penicillium camemberti
MESARSLYKNDIDFAALALQSRDFAKYLNQTGQLDFTDPAAIRQLTTTLLQQDFHLKVEIPEDRLCPPVPNRLNYILWLQDLLDSTAGGLHEGYDRDRDVFGLDIGTGCIGIYPLLGCATRPRWNFVATDIDSNNIRTSRHNVALNNLESRIQIIHSDPTGPLFPLEKLGRQTLDFTMCNPPFYTSPDELKQSAEQKEQEPFSTCTGADVEMVTRGGEVAFVKQMIDESLQLRDRIQWYTSMLGKLSSINVLVETLIKHGVTNFAVTEFEQGSKTKRWAVAWSWGDRRPAMNIARGIPGCPKSLLPFPADYTFTLPPGTSIDASTATINAELSSLPWFWAWDQTRSSGTGYAAENVWSRFARRKMKLAGEEGAAKLKVIPAQVALGVRLQIRLVRGQKPDEKEVRVLVRWAQGTDTVLFESFCGMVKRKLESK

SEQ ID NO: 246 - protein, 433 aa, Penicillium expansum
MESARSLYKNDVDFAALALQSRDFAKHLKPNGQLDFNDPAAVRQLTTTLLQQDFHLKVEIPDDRLCPPVPNRLNYILWLQDLLDSTAGGLNEGYDRGREVVGLDIGTGCIGIYPLLGCATRPGWKFIATDIDSNNIRTSRHNVSLNNLESRVQIVHSDPTGPLFPLENLGRQTLDFTMCNPPFYTSPNELKQSAEQKEREPFSTCTGAEVEMVTRGGEVAFVKQMIDESLQLRERVQWYTSMLGKLSSINVLVETLIKHGIANFAVTEFEQGSKTKRWAVAWSWGDRRPAMNIARGIPGCPKSLLPFPADYTFTLPPGTSIDTATAIINAELSSLPWFWTWDQTRSAGTGFAAENVWSRFARRKMKLAGEEGAAELKAIPAQVALGVRLQIRLVRGEKPDEKEVKVLVRWAQGRDTVLFESFCGMVKRKLESK

SEQ ID NO: 247 - protein, 433 aa, Penicillium arizonense
MENARSLYRNDVDFAALALQSRDFAKYLKPKSQLDFSDPAAVRQLTTTLLEQDFHLKVEIPEDRLCPPVPNRLNYILWLQDLLDSTTGELKSGYDSNREVIGLDIGTGCISIYPLLGCTIRPGWKFVATDIDSNNICSSQHNVRLNNLEHRIRVINTDAEGPLFPLDKLGHETLDFTMCNPPFYTSRDELIQSAEQKARPPFSACTGAEVEMVTRGGEVAFVKRMIDESLVLRDRIQWYTSMLGKLSSVSALVEMLMQHDNHNYAVTEFVQGNKTKRWALAWSWGNKRPIMTAARGIPGFPKHLLPFPADYAFTLAPGTSIDTASAILNSEFDSLPWFWSWDEDASAGTGLAAENVWSRQARRKMKLAGQEGAGRLKDVPAQVQLGVRVYLRLLRGQKLEDKEVQVLVRWTQGTDSVLFESFCGMVKRKLEAK

SEQ ID NO: 248 - protein, 436 aa, Aspergillus clavatus
MRTARSIYKDDVDFTTLALQSPDFAKYLKGNGQLDFSDPDAVRQLTKSLLQRDFNLKVTIPENRLCPPVCTLTNSRYIRLNYILWLQDLLDTTGDEYRDDYDPDRNVLGLDIGTGCCSIYPLLGCATRPKWNYLATDVDDDNIRTARENVSANGLESRIQVIKTNPDDGLIPLATKFEVESLDFTMCNPPFYASRDEMIASAEAKERPPFSTCTGAEVEMVTEGGEIAFVSGMIEESLKLRDRVIWYTSMLGKLSSVSAIVEKLMTHGNRNYAVTEFVQGSKTKRWAVAWSWSDLRPTMNVARGIAGFPKHLLPFPSESTFELSNESIDSVGDRINEELSHLHLDWTWRKNLATGVGFAMENVWSRQARRKMQNPTTSGDKMEIDEQKAALGFKIQLKQNPLDEKCFRLTVRWLKGTDSVLFESFCGMLKRKVEGR

SEQ ID NO: 249 - protein, 428 aa, Aspergillus arachidicola
MRVIRNNIYKDDVDFATLALQSPEFAKYLKPNNQLDFSDPDAVRQLSKSLLQRDFGLNVHIPENRLCPPVPNRLNYILWLQSLLDTTGKEYHDDYDPDRKVVGLDIGTGCCSIYPLLGCSVRPQWNFVATDIDDDNVRTSQEAVSGNNLDSRIRIVKTDPSDLIPLDKLEVEGLDFTMCNPPFYTSREELVSSAQAKERPPFSACTGAEVEMVTQGGEVAFVSRMIEESLRLRQKVLWYTSMLGKLSSVSILVEKLIEHGNHNYAVTEFVQGSKTRRWAIAWSWGDLRPSVDVARSITTFPKHLLPFPSEYVFNIPSGSIDAASQKLDKELASLSLQWLWRSNLAMGVGFAMENVWSRQARRKMKGSAEAMQSIDVDDSRAALGFKVYLRKEGIEEKGVRVLIRWLKGTDSVLFESFCGMVKRKLEGR

SEQ ID NO: 250 - protein, 457 aa, Absidia glauca
MGKRQRFDNDGNGVEESTDPINSTLNDMHPRNMYKDNPPNFNDLARLYPSFRPFVHGSDDDRPFIDFKNAEAVRELTYCLLKRDFNLTVTFPLDRLCPPIPNRLNYILWIEDLLTETQGQDAKDKQIVGIDIGVGASCIYPLLGCRTNPQWHFIGSELDEESLEVAKANVEQNGLEDRITLFLNKDPLRIFMLDPSIKTYDFCMCNPPFYASEEEVQEGLENKELEPMAACTGTASEMITKDGEYGFIQRMILESLRYKQRIQWYTSMIGLKRTIRPVTQLLKQQGITNYVVTEFCQGRTKRWGIAWSFSSTRVVKSNSLEFYRPKSHFTTELPIPVSQAKIHLHTILADLDISLPDNSSDDDVIQLSPTQNTWSRAARRLRKRQKQDETGTDQQPLPHDLVLTLECALVSSSSTSCTLQTSWLHGDDRSVFESFWNHVKKRMEQEAGIFTGSAFQK

SEQ ID NO: 251 - protein, 433 aa, Penicillium coprophilum
MESARSLYKKDVDFAALALQSRDFAKHLTPTGQLNFTDPAAVRQLTTTLLQQDFHLEVEIPENRLCPPVPNRLNYILWLQDLLDSSAGGLHEGYDRDREVVGLDIGTGCIGIYPLLGCATRPRWNFVATDIDSSNIRTAQHNVALNNLESRIRIVHSDPDGPIFPLEKIGCQTLDFTMCNPPFYTSTDELNKSAEQKERDPFSACTGVEVEMVTSGGEVAFVKKMIDESLQLRDRVQWYTSMLGKLSSINVLVEVLIKHENHNFAVTEFEQGSKTKRWAVAWSWGDRRPAMNIARGIPGCPKSHLPFPSDYTFTLPLDTSIDTATATINAELSSLPWFWSWDQARSAGTGFAAENVWSRFARRKMKLAGEEGAARLKVIPAQVALGVRLQIRLVRGQNPDEKEVKVLVRWAQGTDTVLFESFCGMVKRKLESK

SEQ ID NO: 252 - protein, 441 aa, Pseudogymnoascus sp.
MNSNKNIYKKDVDFTELASQDADFKNIIPTISNIPILKPLSLSLKPNGQVDFSDPESVQQLTKSLLKRDFGLKLDLPPDRLCPAVPNRLNYLLWIQDLLDTSTPTPSLDDTHDPTRPVIGLDVGTGASAIYPLLGCSHYPSWRFACTETDPHSFAFSRQNINQNNLSNRIRLLQTDPDGPLLPLDHLGLDTIDFTLTNPPFFTSPSDLLASATLKSRPPSSVCTGAPSEMVTPGGETAFVARMIAESVPLGERVQWFTAQLGKLGSVATVVKDLKERGVKNWAVGELVQGRTKRWVVGWSWAGWRPAIRVARGAVGVAGGDLPFPSEAVAVKVVVEAGEVGRRVDEAVGGLGGRWKWDADSGVGVGFVARNTWSRAARRKGGGMEEEGDEMAFGFRIYVREVPGNGEKSAETEVVVRWLKGDDSVLFESFCGMVKRKVEAQ

SEQ ID NO: 253 - protein, 429 aa, Aspergillus bombycis
MRAMRNNIYKDDVDFATLALQSPEFAKYLKPNNQLDFSDPDAVRQLSISLLQRDFGLNVHIPENRLCPPVPNRLNYILWLQSLLDTTGDEYRDDYDPDRKVIGLDIGTGCCSIYPLLGCSVRPQWNFVATDIDDDNIRTSQEAVSGNRLESRIRIVKTDCNGDLIPLDKLEVEGLDYTMCNPPFYTSREELVSSAQAKERPPFSACTGAEVEMVTQGGEVAFVSRMIEESLKLRQKVLWYTSMLGKLSSVSILVEKLIGHGNHNYAVTEFVQGSKTRRWAIAWSWGDLRPSVDVARSITTFPKHLLPFPSEYIFDIPNESIDDASQKLHTELASLPLQWLWRNNLAVGVGFAMENVWSRQARRKMKGSAGAMQNIDVDDSSAALGFKVHLRKEGIEEKGVRVLIRWLKGTDSVLFESFCGMVKRKLEGR

SEQ ID NO: 254 - protein, 450 aa, Penicillium steckii
MTANMASFRDLYKNDVDFAALALQSKEFAKYLKPNGQLDFNDSAAVRQLTVSLLEKDFGLEVKLPDDRLCPPVPNRLNYILWLHDVLDSTTGSSNVTNDPERKVVGLDIGTGCCSIYPLLGCKARPNWNFVATDIDENNARTATENVKLNNLESRIRVIKTEPDDLLFPLEKLDRKSLDFTMCNPPFYTSRQEMLQLSEGKSQEPSSVCTGADVEMVAPGGEVAFVARMIEESLHLRNQIQWYTSMLGKLSSVSALVEKLMKHGNQNYAVTEFVQGSKTKRWALAWSWVDRRPSMTAARGIPGFPKHLLPFPANYQFTLPSEISIDHATSMLNKELESLGWFWNWNKSLSTGVGYATENVWSRQARRKMKLAGQGKSSVKLDVIPEEVALGVRVQAKLVRGQSESSKEHEVHISIDWSQGMDSVLFESFCGMLKRKLELSKPKEVEKTTA

SEQ ID NO: 255 - protein, 430 aa, Penicilliopsis zonata
MNSSRNIYKNEVDFPALALQSAEFAKYLKPNGQLDFNDPDAVRQLTKSLLERDFGIKVDLPDDRLCPPVPNRLNYILWLQDLLDTTGDEYRDGYDPDRDVLGLDIGTGCCSIYPLLGCSLRPRWKFAATDIDDANFANAKKNISQNKLESRIRVVKNDPTDTLISLDGKLADIESLDFTMCNPPFYASQDEMVASAKAKERSPFSACTGAEVEMVTQGGEVEFVSRMIEDSLRLRERVLWYSTMLGKLSSVSMIVEKLLKHGIQNYAVTEFVQGFKTRRWAVAWSWGDLRPTMNVARGISGFPKHLLPFPSEFSFDIPEESIDSVGQAIDLELSKLPIQWNWRNSMSVGVGFAMENVWSRQARRKMQALAADGQKHEIDEDTAALGFKIHLKHDALEENGVRVLVRWLKGRDSVLFESFCGMLKRKVERR

SEQ ID NO: 256 - protein, 433 aa, Penicillium italicum
MENARVLYKNDVDFAALALQSRDFAKHLKPNGQLDFNDPAAIRQLTTTLLQQDFHLKVEIPEDRLCPPVPNRLNYIIWLQDLLDSTAGGLHEEYDRDRKVVGLDIGTGCIGIYPLLGCATRPGWNFIATDIDSNNIRTSQHNVALNNLETRIQIVNSDPTGPIIPLEKLGRQNLDFTMCNPPFYTSSNELKQSAEQKEREPFSTCTGAEVEMITRGGEVAFVKQMIDESLHLRERIQWYTSMLGKLSSINTLVETLIKHGITNFAVTEFEQGSKTKRWAVAWSWGDRRPAMNIARGIPGCPKSLLPFPSDYTFTLPPGTSIDTATATINAELKSLPWFWAWDQTRSAGTGFAAENVWSRFARRKMKLAGEEGAAKLKVIPTQVALGVRLQIRLVRGEKLDEKEVKVLVRWAQGTDTVLFESFCGMVKRKLESK

SEQ ID NO: 257 - protein, 433 aa, Penicillium solitum
MEPARSLYKNDIDFAALALQSRDFAKHLNQIGQLNFTDPAAVRQLTTTLLQQDFHLKVEIPEDRLCPPVPNRLNYILWLQDLLDSTAGGLHEGYDRDRDVFGLDIGTGCIGIYPLLGCATRPRWNFVATDIDSNNIRTSQHNVALNNLESRIQIVHSDPTGPLFPLEKLGRQTLDFTMCNPPFYTSSDELKQSAEQKQQEPFSTCTGAAVEMVTRGGEVAFVKQMIDESLQLRDRIQWYTSMLGKLSSINVLVETLIKHGITNFAVTEFEQGSKTKRWALAWSWGDRRPAMNIARGIPGCPKSLLPWPADYTFTLPPGTSIDASIATINAELSSLPWFWAWDQTRSSGTGFAAENVWSRFARRKMKVAGEEGAAKLKVIPAQVALGIRLQIRLVRGQKPDEKEVRVLVRWAQGTDTVLFESFCGMVKRKLEAR

SEQ ID NO: 258 - protein, 336 aa, Rhizopus azygosporus
MHPKNIYNIEPDFKELAATFDSFKPFVKQQSNGRAYIDFKDPLAVKTLCQCLMKRDFGIDLDFPLDSLCPAVPNRLNYILWLEDLVSETMQDDKIRGIDIGVGASCIYPLLGCARNPHWTFLGTDINHRSIEWAQKNVRKNGLEDRIKIRHNDDPEKILVIDKEEYTFCMCNPPFYESQEELERGLVNKELEPSAVCTGSLHEMITQGGEYGFISRMIKESLEIRTRIRWYTSMVGLKKSIWPLVRLLKASGITNYLVTDLTQGKTTRWAIAWSFHPERAVKTPSLDEYRPKCQFVVKLPQSVDFVMKHIQTILADLDIHIERQDCQSLIGTAKRN

SEQ ID NO: 259 - protein, 429 aa, Aspergillus novoparasiticus
MRVIRDNIYKDDVDFATLALQSPEFAKYLKPNNQLDFSDPDAVRQLSKSLLQRDFGLNVHIPENRLCPPVPNRLNYILWLQSLLDTTGKEYHDDYDPDRKVVGLDIGTGCCSIYPLLGCSVRPQWNFVATDIDDDNVRTSQEAVSGNNLDSRVRIVKTDPSGDLIPLDKLEVEGLDFTMCNPPFYTSREELVSSAQAKERPPFSACTGAEVEMVTQGGEVAFVSRMIEESLRLRQKVLWYTSMLGKLSSVSILVEKLIGHGNHNYAVTEFVQGSKTRRWAIAWSWGDLRPSVDVARSITTFPKHLLPFPSEYVFNIPSGSIDAASQKLYKELASLSLQWLWRSNLAMGVGFAMENVWSRQARRKMKGSAEAMQSIDVDDSRAALGFKVYLRKEGIEEKGVRVLIRWLKGTDSVLFESFCGMVKRKLEGR

SEQ ID NO: 260 - protein, 429 aa, Aspergillus caelatus
MRAIRNNIYKDDVDFATLALQSPEFAKYLKPNSQLDFSDPDAVRQLSKSLLQRDFGLSVQIPENRLCPPVPNRLNYILWLQSLLDTTGKEYRDDYDPGRKVVGLDIGTGCCSIYPLLGCSVRPQWNFIATDIDDDNIRTSREAVSKNKLESRIRIAKTDPSGALIPLDKLEVEGLDFTMCNPPFYTSREELVSSAQAKERPPFSACTGAEVEMVTQGGEVAFVSRMIEESLGLRQKVLWYTSMLGKLSSVSILVEKLIGHGNHNYAVTEFVQGSKTRRWAIAWSWGDLRPSVDVARSITTFPKHLLPFPSEYVFNIPHGSIDYASQKLDKELASLPLQWLWRNNLAVGVGFALENVWSRQARRKLKGSAGAMQSIDVDDSRATLGFKVHLRKEGIEEKGVRVLIRWLKGTDSVLFESFCGMVKRKLEGR

SEQ ID NO: 261 - protein, 288 aa, Pseudogymnoascus sp.
MDSDKNMYKKDVDFTELASQDAEFKNILKPNGQVDFSDPESVQQLTKSLLKRDFGLKLDLPPDRLCPAVPNRLNYLLWIQDLLDTSTPTPSLDDTHDPTRPVVGLDVGTGASAIYPLLGCSHYPTWRFACTDTDPHSFTFARKNITQNNLSNRVRLLQTEPDGPLLPLDDLGLDTIDFTLTNPPFFTSPADLIASASLKSRPPSSVCTGAPSEMVTPGGETAFVARMIAESIPLGQRVRWFTAQLGKLGSVSTVIKELKEKGVKNWAVGELVQGRTKSGSGEGGEKGG

SEQ ID NO: 262 - protein, 425 aa, Blumeria graminis
MELDLDYEIPYKDGIEFSALALQDEDFAKFLKRNGQLDFSNQNAVMQLTKSLLKRDFGLHVSLPEDRLCPPVPNRVSYIVWIQGLLDSSNISSRGTNISSRHVIGLDIGTGASCIYPLLGSTMRPNWQFIATEVDEKSLEFARANIELNNLESRIRLVKTDLQDSLLPLDYLACARIDFTMCNPPFFESTEDMLSSAKAKKKPPFTACTGSKGEMVTAGGEVAFVMRMIDESLMLKSRVQWFTSMLGKRSSLAVIQSKLREVGIENFAITEFIQGSKTKRWAIAWSFDDWRPSFSVARGLEKVQKSSLPFPPEFYFMSTNDKFTLGERVNEILSKLCLQWQWDTQVLAGIGFSDKDVWSRAARRQNKSSVIVISNRDEKAFGFKIQIQEASSEELSTKMTIRWLKGHDRVIFESFCGMMKRECSK

SEQ ID NO: 263 - protein, 442 aa, Talaromyces stipitatus
MHSSRNIYKREIDFRELALTSPEFAKRLKSNDQLDFSDPDSVRQLTKSLLERDFKLAVDLPDDRLCPPIPNRFNYILWLQDLIDTSSRTGTDQYDPNREVLGLDIGTGCCAIYPLLGCSSRPRWSFIATDIDSKNVSLSQKAVSDNKLDDRIRIMQTNKDDPLIPTDKLDVESLDFVMCNPPFYESEDELLSSAEAKSRPPFSACTGAAVEMITPGGEVAFIESLLTQSLTLKTQVLWYTSMFGKLSSVSIIVQKLLDNGISNWAVTEFVQGKGTRRWAVGWSFSDWRPRSDVSRGIASLPKHLLPFPSDYKFDLQRTQKGSLGQAISKIEAEFSSFRYFRYSWFSAQSCIGYAKEDVWSRKARRKHSREQHDDPLEYKQSMRHDELVFAVEEAALGFRIDLSLQADHSVDVVIRWIKGSDQVLFESFCGMIKRKATEEVHE

SEQ ID NO: 264 - protein, 465 aa, Coniochaeta pulveracea
MADSKKRKAPDEEAAVTPRKIVHRDFPGSDLSGVKDNFYRELYNKEVDFRSLAKQDADFAAIIKSNGQLDFTDPKAVMQLTKTLLKLDFGLKLELPDDRLCPPVPNRHNYILWLKSLLDSTSYSPFTRKVTGIDIGTGASCIYPLIGVTQRPSWYFIGTDIDAKSLVYARRNVELNGLQDRIRIVAKNRDDAHLLPLDDVDLDKVDFVMCNPPFYTSDEDMVNSAEKKARPPNSVCTGAPVEMVCEGGEVTFTTRLLEDSLHFRERVQWYTTMFGKLTSLQEFVGKLREKGIDNYAVTEFVQGNKTKRWAVGWSFGSMRPSDEAARGVKGALWKGLLPPVVEVEIGKANLKDGVRPLEERLSVVVGGLELMEWNWDKEKLRGVGRARENVWSRAWRRRKMREEKEGKANGAEDVKSDGECEFGFLVSARVSNTEATINLRWLEGHDNGLFESFAGWLKTQMKSFL

SEQ ID NO: 265 - protein, 465 aa, Coniochaeta ligniaria
MDSNKRKAPDEVVVASGEIIHRDFPESDISSVRDSYYANLYTKEVDFRGLSKQDAEFAAILKGNGQLDFSDPAAVLQLTKTLLKLDFGLKIELPGDRLCPPIPNRHNYILWLKELMDTTSYSEPGRKLRGIDIGTGASCIYPLLGATQRPWCFIATDVDPESLDYARRNVAINGLEDRIQIVAKTKDDAYLLPLNDCIVDKVDFTMSNPPFYESEADLARSAKKKARPPNSACTGAPVEMVVEGGEVAFVGRLLQESLHFRDRVQWYTSMFGKLPSLHNFIEKLRQNGIDNYAVTEFVQGKKTKRWAVGWSFGDMRPSDKAARGVKATTWRSLLPCATWVEICSFSIDRGVSPMVQRITAVMASLELISWVWETEKLQGIGRARENVWSRAWRRKKKQQEQLLIDDTASTRRPEDAEEVCKLGFLLSVRISRSEATVGLRWLEGHHNGLFESLSGYIKSQLSSIL

SEQ ID NO: 266 - protein, 447 aa, Aspergillus sclerotiicarbonarius
MRASRNIYKDEVDFTALALQSPDFAKQYVQPNATCAFPSALKSSSLKSNGQLDFSDPDAVRQLTKSLLQRDFELKVEFPENRLCPPVPNRLNYILWLQDLLDTTGDEYRDNYDPDREVIGLDIGTGCCSIYPLLGCYMRPHWRFIATDIDNDNIKTSRETVSANKLDSRIEIIQTDPKDDLISLDTKLKVDRLDFTMCNPPFYATRDELITSAEAKERPPFSACTGAEVEMVTTGGEIAFITRMIEESLHLRERVIWYTTMLGKLSSVSVLIETLLEHKNKNYAVTEFIQGNKTRRWAIAWSWTDLRPTVTVARGTSAIPKHLLPFPSEYIFITQSESLDEVSAKIDAELTSLHIQWLWRKNLTTGVGFAMQNVWSRQARRKMQNPDAMADKATIDETNAALGFKVQLKKDPIDEKGVRVIIRWLKGSDTVLFESFCGMLKRKVEGK

SEQ ID NO: 267 - protein, 599 aa, Pseudogymnoascus sp.
MNSDKNIYKKDVNFAELASQDVEFKIILKPNGQVDFSDPDSVQQLTKSLLKRDFGLKLSLPPDRLCPAVPNRLNYLLWIQDLLDTSTPSPSLTDDHDPARQVVGLDVGTGASAIYPLLGCSHYPTWRFACTDTDPHSFTYARQNITQNNLSNRVRLLQTDPDGPLLPLDDLGLDTIDFTLTNPPFFTSPDDLLASSALKSRPPSSVCTGAPSEMVTPGGETAFVARLIAESIPLGQRVRWFTAQLGKMGSVATVVAELKKSGVKNWAVGELEQGRTKRWVVGWSWLGWRPAVRVARGAVGVAGADLPFPSEAVVAKVAADGEEVGRRVDEAVEELGGKWKWDGEMGVGVGFVARNKWSRAARRKRDNDGEEGDEMAFGFRIYVREVPVDKERPAGKEVEQLPGSWAAQKLLFQFSQAISISPKHHHTNVPQHNHHLNPHPPQTNKQASPHHHAHTAKNTNKLAAAPQSNASPHDAHTRRPPQLTPLHHANVQHQAPHLYLQLPRSHGSTPIWYNQVLSGINQVLSGIIKSHPVPSSPMNLPSPRSTAVLPLRPNTPGTTNRPSSAELAQQAHHRTRPRKPFLAPQHRPDSGTFLPRPNV

SEQ ID NO: 268 - protein, 492 aa, Fonsecaea erecta
MPAPDNIYQNDVDFTTLALQYPDFAKRLKPNRQLDFSDPESVRQLTKCLLHRDFDLTVDLPEDRLCPPVPNRFNYILFIQRLLDSTSPSFHQGFDPDRQVIGLDIGTGASAIYPLLACRQRPQWRFLATEIDEKNREYAQRNILANALQSRIRLIDTDEKGDRLIPTDQLERFDRIDILITNPPFYPSTQSLDESARQKSRPPNSSCTGAAVEMITPGGEVGFVAKLVDESRRPANRSKIQWFSAMLGKLSSVGAVVERLREQRCGNFAVAEFVQGQRTRRWCVAWSWMGYRPANDVARSLGGGSGVEKKLLPAITEVEFEAAVRDAGVEGVLDMIASEIIQGLDGVRWKGDRARGVGMFMSRDGDVWSRKARRRKMAVGREPAAGRNRASHAKETGGGNKRDTDTDMKDDDDGTNSNLSSDDEPEPALVVRISITPSPSPSPSSSTTTTTGTAPTARIHMRHLQGPDPVLFESFCGWLKRKIVAAAMSSLP

SEQ ID NO: 269 - protein, 429 aa, Aspergillus coremiiformis
MRVARNNIYKNDVDFATLALQSPEFAKYLKRNNQLDFSDPDAVRQLTKSLLQRDFNLNVHIPENRLCPPVPNRFNYILWLQGLLDTTGNEYRDDYDPDRKVTGLDIGTGCCSIYPLLGCAVRPQWNFVATDIDDDNIRTSQETVSANKLESRILIVKTDLSGSLIPLDKLEVKAIDFTMCNPPFYTSRKELVSSAEAKKRPPFSACTGAEVEMVTQGGEVAFVSRMIEESLRLRERVLWYTSMVGKLSSVSILIEKLIEHGNHNYAVTEFIQGSKTRRWAIAWSWGDLRPSVDVARSITNLPKHLLPFPSEYIFDIPTGSIDDAGQRLDNELTSLPLQWFWRNNLTTGAGFAMENVWSRQARRKMKGSAGAMQSIDIDESKAALGFKVHVRKEGIEEKGVRILIRWLKGTDSVLFESFCAMVKRKLEGR

SEQ ID NO: 270 - protein, 433 aa, Penicillium antarcticum
MENARSLYKNDVDFAALALQSRDFAKYLKPKSQLDFSDPAAVRQLTTTLLEQDFQLKVEIPEDRLCPPVPNRLNYILWLQDLLDSTTGELKSGYDSSREVLGLDIGTGCISIYPLLGCTTRPGWKFVATDIDPNNVYSAQHNVQLNKLEHRIRVIKTDAEGPLFPLDKLGHATLDFTMCNPPFYTSRDELIQSAEQKSRPAFSACTGAEVEMVTRGGEVAFVKRMIDESLVLRDRIQWHTSMLGKLSSVSVLVEMLMQHDNHNYAVTEFVQGSKTKRWAVAWSWGDRRPIMTAARGIPGFPKHMLPFPADYTFTLAPGTSIDTASAALNSELDSLPWFWSWNQNASAGTGIAAENVWSRQARRKMKLAGQEGAGKLNDVPAQVQLGVRVYLRLLRGQTPENKAVQALVRWTQGTDSVLFESFCGMVKRKLETK

SEQ ID NO: 271 - protein, 395 aa, Rhizopus microsporus
MHPKNIYNIEPDFKELAATFDSFKPFVKQQSNGRAYIDFKDPLAVKTLCQCLMKRDFGIDLDFPLDSLCPAVPNRLNYILWLEDLVSETMQDDKIRGIDIGVGASCIYPLLGCARNPHWTFLGTDINHRSIEWAQKNVRKNGLEDRIKIRHNDDPEKILVIDKEEYTFCMCNPPFYESQEELERGLVNKELEPSAVCTGSLHEMITQGGEYGFISRMIKESLEIRTRIRWYTSMVGLKKSIWPLVRLLKASGITNYLVTDLTQGKTTRWAIAWSFHPERAVKTPSLDEYRPKCQFVVKLPQSVDFVMKHIQTILADLDIHIERQDCQSLIGTAKRNSWSRAARRQKRQKITHEPEKDLFTFEMILEPNTVLQISWTKGQDRNLFESFWSHVKKRI

SEQ ID NO: 272 - protein, 440 aa, Psilocybe cyanescens
MGLLADTGIDAVATVLEKVAVDVTFAESDGGHTGTNVVEVVIGVPNRLNYILWLQDIVSAHDQILATQKRAVRGIDIGTGSTAIYPLLGCKWDDTWNFIATELDDESFVHARENIARNNLDSRIQLRKATRDGPILFPLEDKSCQIPGHPIDFTMCNPPFYGSRKEIDDSAEDKALMPNAVCTGADIEMIYANGGESGFVGRMVEESLEYQTSCRWFTSMLGKLSSVQNIVQRLRHHGITNYAITEFVQGQTRRWAIGWSFLDVRLPDAVARIQSIGPNHPLHSLLPQRTTLRQTFPETSSSSLRQALDEVLDLIPGIAITGPVSGAVEDAVSFVVEVSSDTWSRSARRKGKKAQDLKVSAISSKSTQISTAQSPSPALTASVTCQPTPFTSAQQHASDSRADSILAALEFQWVFGTDRGLYESFVSHITRKVGNAVQKA

SEQ ID NO: 273 - protein, 428 aa, Aspergillus avenaceus
MRAARNNIYKNDVDFATLALHSPEFARYLKPNNQLDFTDPDAVRQLTKSLLQKDFDLNVDIPDNRLCPPVPNRLNYILWIQGLLDTTGDEYRDDYDPDRNVVGLDIGTGCCSIYPLLGCAMRPQWNFVATDIDDNNVQTSQEAVSANKLQSRIRVVQTKSSDNLFSIEKLGVNGLDFTMCNPPFYTSREEMVSSAEAKERPPFSACTGAEVEMVTDGGEIAFVSRMIEESLQLREKVLWYTSMLGKLSSVSVLIEKLIKHGNHNYAVTEFVQGSKTRRWAIAWSWGDLRPTVDVARSITKFPKELLPFPSEYTFDIPSGVIDDLGLKLDEELSSLAVEWHWQKSLATGVGFAMENVWSRQARRKMKSAGAMQGLEIDERKATLGFKVQLKKEGIEKEGVRVLIRWLKGTDTVLFESFCGMVKRKLEGR

SEQ ID NO: 274 - protein, 429 aa, Aspergillus nomiae
MRAMRNNIYKDDVDFATLALQSPNFAKYLKPNNQLDFSDPDAVRQLSISLLQRDFGLNVHIPENRLCPPVPNRLNYILWLQSLLDTTGDEYRDNYDPDRKVIGLDIGTGCCSIYPLLGCSVRPQWNFVATDIDDDNIRTSQETVSGNRLDSRIRIVKTDSNGDLIPLEKLEVEGLDFTMCNPPFYTSREELVSSAQAKERPPFSACTGAEVEMVTQGGEVAFVSRMIEESFRLRQKVLWYTSMLGKLSSVSILVEKLIGYGNHNYAVTEFVQGSKTRRWAIAWSWGDLRPSVDVARSITTFPKHLLPFPSEYIFDIPNASIDDASQKLDNELTSLPLQWLWRNNLAVGVGFAMENVWSRQARRKMKGSAGAMQNIEVDDSSAALGFKVHLRKEGIEEKGVRVLIRWLKGTDSVLFESFCGMVKRKLEGR

SEQ ID NO: 275 - protein, 302 aa, Linnemannia elongata
MHPNNPYFNNPPNFVALAQLYPSLAPLLSLKGSSGAETKGIINFQDPSALRELTYCLLKKDFSIDLNIPLDSLCPPIPNRLNYVCWIEDLLDNESTKEIHGIDIGTGASCIYPLLGCSRNKNWRMVATDIDDRSISFAESNVKRNHLDNVIKIIKNSSTDTFPAILFKDREQRYDFCMCNPPFYKDEQDIQDSLEGKEGQPSAICKGTTNEMITTGGEAQFVKQMVDESIIHGQRIRWYTSMLGKRGTIDTVIAYLKEKKILNYTLTTFRQGRTSRWAIAWSYGNAHASRVCLPAIFYFYSP

SEQ ID NO: 276 - protein, 468 aa, Coniochaeta sp.
MSSTNLKRKAPNDEAVVASEPVGQRAFPGSDLSAVKDSYYANLYTKEVDFRSLSKQDPEFAAVTKGNGQLDFSDPAAVMQLTKTLLKLDFGLKIELPHDRLCPPVPIRHNYILWLKELMDTSSYSEPGRKLTGVDIGTGASCIYPLLGVTQRPWYFIATDIDHRSLDYARRNVSINGLEDRIRVVAKSKDDAHIVPLDECGVDRVDFTMTNPPFYESEADLTRSAAKKARPPSSACTGAPVEMVVEGGEAAFVGRLLQESLLFRDRVQWYTSMFGKLGSLQEFIEKLRENEIDNYAVTEFVQGKQTKRWAVGWSFGDMRPSEKAARGVKAATWRSLLPHATLVETCAFPVDTGVSRIEVRIGEMMASLDLISWVWEREKLQGIGRARENVWARAWRRKKKREEQALADGGTIPSHIQDVEEICKLGFLVSIRISKSEATVAIRWLEGHDSGLFESLSGFIRSQLNDLS

SEQ ID NO: 277 - protein, 429 aa, Aspergillus pseudotamarii
MRAIRNNIYKDDVDFATLALQSPEFAKYLKPNSQLDFSDPDAVRQLSKSLLQRDFGLNVHIPENRLCPPVPNRLNYILWLQSLLDTTGKEYRDDYDPDRKVVGLDIGTGCCSIYPLLGCSVRPQWNFIATDIDDDNIRTSREAVSGNKLESRIRIAKTDPSGALIPLNKLKVEGLDFTMCNPPFYTSREELVSSAQAKERPPFSACTGAEVEMVTQGGEVAFVSRMIEESLELRQKVLWYTSMLGKLSSVSILVEKLIGYGNHNYAVTEFVQGSKTRRWAIAWSWGDLRPSVDVARSITTFPKHLLPFPSEYVFNIPHGSIDHASQKLDKELASLPLQWLWRNNLAVGVGFALENVWSRQARRKLKGSAGAMQSIDVDGSRAALGFKVHLRKEGIEEKGIRVLIRWLKGTDSVLFESFCGMVKRKLEGR

SEQ ID NO: 278 - protein, 446 aa, Aspergillus uvarum
MSTSRNIYKDDIDFTALALQSPDFAKYLKSNGQLDFTDPDAVRQLTKSLLRRDFDLKVDIPDKRLCPPVPNRLNYILWLQDLLDTTGDKHQDSYDPGRKVVGLDIGTGCCSIYTLLGCSMRPGWSFFATDIDEGNIESSRANVSANALDSRITVVRTNSEEKLIPLDTKLKVDRSVPAPLMHLPCLTPRRLDFTMCNPPFYASRDDMLASAEAKDRPPFSACTGAEVEMVTAGGEIAFISRMIEESLQLRDKVLWYTSMCGKLSSISVLIEKLVGHGNNNYAVTEFVQGNKTKRWALAWSWTDLRPTAAVARGIPTISKHLLPFPSEYTFTATTDSIDEVATTVDGELGALPLQWHWRKSLASGVGFAMQNVWSRQARRKLRNPDAMADQPPVEESKAALGFRVQSKKEISDDKGVKVIIRWIKGTDTVLFESFCGMLKRKINSKP

SEQ ID NO: 279 - protein, 519 aa, Cladophialophora immunda
MPAPDNIYESDVDFTTLALQYPDFAKRLKPNRQLDFSDPESVRQLTKCLLHRDFDLTVDLPEDRLCPPVPNRFNYILFIQRLLDSTSPSFHMGFDPDRQVIGLDIGTGASAIYPLLACRQRPQWRFLATEIDEKNREYAQRNILANKLQARIRLIDTDVKGDRLIPTDQLERFDRVDILITNPPFYPSTESLLDSVRQKSRPPNSSCTGSAVEMITPGGEVGFVSKLVAESRLRANKSKIQWFSAMLGKLSSVGTVVERLRESGCANYAVAEFVQGQRTRRWCVAWSWMGYRPAADVARSVGGGSGVEKKLLPTITEVEFEAESRGAGVEAVLDRIGAEIKRLDGVLWKIDHGGGVGMFMSRDGDVWSRKARRRKKAEGELGHGRETRPTRAADQKARERKHDADTDMKDDNGSSDSNSSDEETAPEPALVVRISITPSPSPPRSDPPPPSRSSVDTNIPIQSRTGTVSNTATTDKIPIMRIHMRHLQGRDPVLFESFCGWLKRKMAAPLPRPLSSSSS

SEQ ID NO: 280 - protein, 427 aa, Aspergillus versicolor
MATARNIYKDGVNFASLALQSPDFAKFLKPNNQLDFTDPDAVRQLTVSLLKRDFGLKVEVPEDRLCPPVPNRLNYVLWLQDLLDTTGDEYRDGYDPDRVVTGLDIGTGCCSIYPLLGVTMRPRWNFIASDIDNENIRTSKHTIKANKLESRIRAVKTSSSDDLVPLDTVGVERLDFTMCNPPFYSSQDEMLASAEEKERPPFSACTGAEIEMVTPGGEISHVIRMITESIQLKERVLWYTSMLGKLSSVSMIVEKLIELGNHNYAVTEFVQGNKTKRWAIAWSWTDLRPTVSVARGIPGFPKHLLPFPSEYTFELPDSSIDNVGRIADTELSSLHVHWVWRKNLAMGVGFAPENVWSRQYRRKMKISNSEEKPEVDEGKAALGFKIQLRMDPVEDKLVRVVVRWLKGTDSVLFESFCGMIKRKLEGR

SEQ ID NO: 281 - protein, 455 aa, Leucosporidium creatinivorum
MELLGSPYRTAPRFDELAAAIPAFAPFLRTTSKGQPTIDFQNDKAVRALTSALLERDFQLAMDLPEDRLCPMVPGRLEYMLWILQLSLRTLGPTPSPPPLAGLDIGTGSSCIYPLLGCRSYPSLQFVASDVDDHSLSYARRNVQNNRMEDRIDVRKVEALGSMFPAGNFDFTMCNPPFYSTAEEIADSLAAKELEPYAVCTGGANEMVTDGGEVAFVGRMVEESLTCGERIRWFSSLLGKYSSIAPLVAQLQSHSIENYTIKELTQGQTQRYVLAWSLQSTRLPSDTYHPRAAEYSNQPLAKLLPPSNAHTYFCPPSLRPSDVKEVLSTTIGELEGSGLVWSQEAADVKETGTLQARKNGWSRSARRKGKGSAMATEGDLTLSIASPSEFAQKEDVLLEAVVSIKLEGQQVKVEAEWTKGCDRARKDWATLWAYLIRRLVDRAKEMSSVGDAMEH

SEQ ID NO: 282 - protein, 429 aa, Aspergillus parasiticus
MRVIRNNIYKDDVDFATLALQSPEFAKYLKPNNQLDFSDPDAVRQLSKSLLQRDFGLNVHIPENRLCPPVPNRLNYILWLQSLLDTTGKEYHDDYDPDRKVVGLDIGTGCCSIYPLLGCSVRPQWNFVATDIDDDNVRTSQEAVSGNNLDSRIRIVKTDPSGDLIPLDKLEVEGLDFTMCNPPFYTSREELVSSAQAKERPPFSACTGAEVEMVTQGGEVAFVSRMIEESLRHRQKVLWYTSMLGKLSSVSILVEKLIGHGNHNYAVTEFVQGSKTRRWAIAWSWGDLRPSVDVARSITTFPKHLLPFPSEYVFNIPSGSIDAASQKLDKELASLSLQWLWRSNLAMGVGFAMENVWSRQARRKMKGSAEVMQSIDVDDSRAALGFKVYLRKEGIEEKGVRVLIRWLKGTDSVLFESFCGMVKRKLEGR

SEQ ID NO: 283 - protein, 434 aa, Penicillium oxalicum
MEQVRSLYKSEIDFAALALQSRDFAKHLRFDDQLDFHDEAAVRQLTISLLEHDFSLRVDLPKNRLCPPVPNRLNYIIWIQDLLDTSTAGVRDGYDPDREVVGLDVGTGCCSIYPLLGCKVRRRWRFIATDIDEQNLQTARANVSRNGLDSRIKIIKSTADAPLFALDTFEQDTLDFTMCNPPFYASEQDMLSSAESKSYVPFSACTGAAVEMIVAGGEVAFVTRMIEESRQLRHRVQWYSSMLGKLSSVTTLVELLIKYDNNNYAVTEFVQGSKTKRWALAWSWEDRRPSMAVARNIPGFPKHLLPFPADFTFTLPANTNIDGAISRMNAEFASLPWHWTWHKDLSAGVGFAPENVWSRQARRKMKLLAGQAQSGTLLAVPKVIALGVRVQLRLLPGEDRESKEVQATIRWIQGTDSVIFESFCGMAKRKIEGR

SEQ ID NO: 284 - protein, 435 aa, Penicillium vulpinum
MESARSLYQNDIDFAALALQSRDFAKHLKPNGQLDFNDPAAVRQLTTTLLQQDFHLKVEIPGDRLCPPVPNRLNYILWLQDLLDSTAGGLHEGYDRDREVVGLDIGTGCISIYPLLGCATRPRWNFVATDIDLNNLRTSQHNVSLNNLESRIRIIRSDPDGPLFPLEKLGCQTLDFTMCNPPFYTSTDELIKSAEKKERDPFSACTGVEVEMVTSGGEVAFVKKMIDESLQLRDRVQWYTSMLGKLSSINVLVETLIKHENHNFAVTEFDQGSKTKRWAVAWSWGDRRPAMNIARGIPGCLKSHLPFPSDFTLTLPPGSSIDKAIATINTELNSLPWFWSWDQTRSAGTGFAAENVWSRFARRKMKLAGEEGAAKLKMIPDQIALGVRLQIRIVRGENPGEREVKVLVRWAQGTNTVLFESFCGMVKRKLNLESK

SEQ ID NO: 285 - protein, 436 aa, Penicillium brasilianum
MEPARNLYKNDIDFAALALQSRDFAKHLRFNGQLDFHDETAVRQLTISLLQHDFGLKVELPADRLCPPVPNRLNYIIWVQDLLDSASGTVHDTYDPDREVVGLDVGTGCCSIYPLLGCKTRPKWKFVATDIDEQNARTAQENISRNELDSRIQILKPDPEGPLFPLDKLAYTTLDFTMCNPPFYASQEEMLSSAETKSHVPFSACTGAAVEMIAPGGEVEFVTRMIEESLQLRDRIQWYTSMLGKLSSVTKLVELLIEHNNHNYAVTEFVQGSKTKRWALAWSWGDRRPAMYAARNIPGFPKHLLPFPADFSFTLPPETNIDTAISTVNAELRSLPWYWDWNKSLSAGVGFASENVWSRQARRKMKLAGQAETGNLDAIPQEIALGVRVQLKLLERKEPESKEVQVLVRWTQGTDSVLFESFCGMLKRKMEGKCGT

SEQ ID NO: 286 - protein, 468 aa, Colletotrichum higginsianum
MSSKKRRHSDAESKHETDKSLQNAVRHAGRGSATTRPQQPGTHADAYYRNLYSTEPDFNNLGRQDPAFGAMLKRGTLDFNDPAAVMQLTKTLLRIDFGLEIELPEDRLCPPVPNRHNYILWLKGLLDSTTYDDPDRKSVGLDIGTGASCIYPLLGCTQRLWSFFATDIDQKNLAYARKNVQSNNLHNRISVVARTAQDPILSLDSLGVDELSFVMCNPPFYTSEEDLLDSAQKKSRPPLTACTGAPVEMVTDGGEVSFVGKMLEESLVLRDRVQWYTSMFGKQSSLEEFVNILREKAIDNYAVTEFVQGNKTRRWAVAWSFGPMRPSEEVARGLKAATWKKILPMAVESEVVSFPLDDGAGKLGDKIQGLMSSLELTSWEWDHERLVGIGRARENVWSRAWRRKKMREERDGKPEVAVTDSEVCRFGFEVALRVGRENIAVLCRWREGHDQAIFESFGGFLKTRLTTG

SEQ ID NO: 287 - protein, 211 aa, Serpula lacrymans
MHARNPYRDPPRFAELAKAYPPLSPYIIRNPDGTSTIDFKNDKAQRCLTEALLHRDFGIKLNLPSDRLCPPIPNRLNYVLWIQDIIRSTYGQHTNTIRGIDIGTGASAIYPLLACTLEPSWCFAATEIDETSFNYAQQNVTNNDLQDRIHIISAHLNAPILTPLINCYDDDNQYHFTMCNPPFYNSAEDVERSLAAKELEPHAVRVNMSYF

SEQ ID NO: 288 - protein, 433 aa, Penicillium polonicum
MESARSLYKNDIDFAALALQSRDFAKYLNQTGQLDFTDPAAVRQLTTTLLQQDFHLKVEIPEDRLCPPVPIRLNYVLWLQGLLDSTAGGLHEGYDRDRDVIGLDIGTGCIGIYPLLGCATRPRWNFVATDIDSNNIRTSQHNVALNNLESRIQIIHSDPTGPLFPLEKLGRQTLDFTMCNPPFYASSDELKQSAQQKEQEPFSTCTGAAVEMVTRGGEVAFVKKMIDESLQLRDRIQWYTSMLGKLSSINVLVETLTKHGITNFAVTEFEQGSKTKRWAVAWSWGDRRPAMNIARGIPGCPKSLLPFPADYTFTLPPGTSIDAATATINAELSSLPWFWTWDQARSSGTGFAAENVWSRFARRKMKLAGEEGAAKLKVIPTQVVLGVRLQIRLVRGQKPDEKEVRVLVRWAQGTDTVLFESFCGMVKRKLESK

SEQ ID NO: 289 - protein, 466 aa, Glomus cerebriforme
MSSPKEYLLAKGVLGKRPYAESTETEDLSNHNKMHPRNRYKDKSPDFSILAFKYSSFYPFVQYSKEGKSYIDYKDPEAVRELTYCLLRDDFNLVLDIPLDTLCPPIPSRLNYIHWIEDLVSSTESHEEMSQNTIYGIDIGTGASCIYPLLGCTLNKNWVFLATDIDTKAIKYAKDNVLRNNLDDRITVHLNKTEKKILMFENMLKDTTLKFSFCMCNPPFYESQEQYEKGVENKITSPHSVCTGSSNEMFTPGGEFQFIKDILEESLILRTKIRWYTSKIGRLETVNKVVRELKKAKIDNYVVTEFCQGHTRRWGIGWSFGSQRPNFNVLQPVSKKLRKSVPPKNEFCVVLTANTGDLLEFLQHLFDKLEITGQWEKESNTFHGSAQINTWSRSARRAKSKSDVQKTPIMRKAPEGEDLFEFACNLEPLDLSTRVTVSWTNGKDRNIFESFYLHIKKRLEQEFSVD

SEQ ID NO: 290 - protein, 481 aa, Rhizophagus irregularis
MPRNRHKDKFSLNAKSAPKELLGKRSHSESTESDLFSPNKMHPRNKYKDNPPDFSVLAFKYPSFYPFVNYSKEGKPYIDYKNPEAARELTYCLLREDFNLFLDIPLDTLCPPIPSRLNYIHWIEDLISSTESHEELGKNTVHGIDIGTGASCIYPLLGCTLNKNWVFLATDIDKKAVKYAKDNVHRNNLDDKITVRRNKTDKKILLNENMIKDTTIKFSFCMCNPPFYENQEQYEKGVESKITSSHSVCTGSSNEMFTPGGEFQFIKDILEESLILRTKIRWYTSKIGRLETVNKIVCELKKSGIDNYVVTEFCQGLTRRWGIGWSFGSQRPTFSGSQPVSKKLRRAAPPKSEFSVVLPTNVGEIFKFLRNLFDELEVTGQWNEESNTFYGSAQINTWSRAARRAKAKTEAQKTPITQKAGDENLFEFTCNLEPEPLDVSISNTRVIISWTNGKDRNIFESFYLHIKKRLEQEFNDKTASL

SEQ ID NO: 291 - protein, 454 aa, Aphanomyces stellatus
MRGEKRKRTPVLNDGIHPRNMYRTPPDFAALANQYTSLRPHVHISSKGAAVMQWSDPQAVKELTKALLHRDFGLTWDMPLNRLCPPLTNRLNYIHWIEDLILLSQPSYVSTIDSPIRGLDVGTGASCIYPLLGHALNQWHFVATDIDPASIECAATTIHANNLATAINLQLVDNSSSIFPPLSRPLLFTMCNPPFFDSIDEADTNPRTSCTGSALEMTTPGGEVAFIGRMIQESVALTTQVRWYTSLIGRKASLRPLLASLRAHGISNTRTTEFLQGRTTRWGIAWSFTDDGLATSDASYKVLGKRKEARRRQETAFRIPHLDQDPCGCASMVQVHARMLESPMLIHEMHVTIKREADDDDDAWNYKMTAADETKKVLWCGRAHVTSIGVDGFDISLAWQAGTARDLFWTFADKWKGVMLRSGRRWRKKAPVAIDDRVGEENRVAPEGSPLGAS

SEQ ID NO: 292 - protein, 429 aa, Aspergillus glaucus
MRAARNIYKNDVDFTALSLQSPEFAKYVKPNGQLDFTDPDAVRQLTKSLLKQDFDLEVDIPENRLCPPVPNRLNYILWLQDLLDTTGDEYRDDYDPDRDVTGLDIGTGCCSIYPLLGCALRPSWKFMATDIDDGNIQTATRTVSANGLESRIQITKTDSNSELIPFKQSGVVRLDFTMCNPPFYASRDELIASAEAKERPPFSACTGAEVEMVTSGGELDFVTRMIEESIQLREKVLWYTTMLGKLSSVSLVAEKLISHNNHNYAVTEFIQGSKTRRWAVAWSWTDLRPAMNVARGITSFPKHLLPFPSESTLVLSNTSIDDLCSKLDTELTALPIQWHWRQNLSTGIGFAKENVWSRQARRKMQNPEAAEKHRMEIDEGHAALGFKVQLKLDGISETRTKVVVRWLRGTDSVLFESFVGMLKRKLEGR

SEQ ID NO: 293 - protein, 459 aa, Venustampulla echinocandica
MSAPTPTSTSSNIYKEDVDFAELALQDAEFAKVLKPNGQLDFSNPESVKQLTTALLKRDFGLKISLPPDRLCPPVPNRLNYLLWIQGLLDTTSSNYSDAYDPQREVFGLDIGTGASCIYPMIGCTQRPKWRFAATGRPRNSLITLKLLRIILLDIDEKSLQFATQNIEQNGLQNRIKLLQTQRSDPLLPLDIMRIENIDFSMCNPPFYESKADMLTSAAVKQRPPFTACTGSENEMVTPGGEVAFVSRMINQSLVLRERVQWYTSMLGKFSSLATLIEELKKNGIENYAATEFVQGNRTRRWAIAWSFDDLRPRMAFSRNVNSIPKTLLPFPSEYHIAFGSSSDTGKVSQHINDVLSGLPLKWMWKPSILVGVGFSDKAVWSRAARRHMAKKGQEGSEEEEEEDDDTDIALGFKIYVEGVAESETLNRVTVRWIKGHDNVLFESFCGMVKRKIDEVIRN

SEQ ID NO: 294 - protein, 435 aa, Uncinula necator
MIAKDNIYQDGINFSSLALIDSEFAKFLKPNGQLDFSDPNAVQQLTKSLLKRDFGVSVILPQDRLCPPVPNRLNYILWIQRLLDTTDSASFIDFKSTNENRYESKNSVVSGLDIGTGAGCIYPILGCVLRSHWKLVGTDIDDKSLEYARQNVSTNHLGDRISIIKTEPQSPLIPFQALGLDHLNFTMCNPPFYESREEMIRSAEVKKKPPFTACTGADFEMIIEGGEVAFISQLIDESLKLKSRVQWYTSMTGKLSSLITLRDKLVSLGINNFALTDFVQGNKTKRWAIAWSFDDYRPTMEVARGLNSVPKSLLPFPSQYRFKVNSLSPSEIGEKINTELSLLSLIWLWERDSLTGKGVSDRDVWSRASRRKHLTQRQESYDHIAHDRMAFGFEIMANEYSDAIKCNQVTIRWVKGHDTVLFESFCGMIKRKCCA

SEQ ID NO: 295 - protein, 429 aa, Aspergillus tamarii
MRAIRNNIYKDDVDFATLALQSPEFAKYLKPKSQLDFSDPDAVRQLSKSLLQRDFGLNVHIPENRLCPPVPNRLNYILWLQSLLDTTGKEYRDDYDPDRKVVGLDIGTGCCSIYPLLGCSVRPQWNFIATDIDDDNIRTSREAVSGNKFESRIRIAKTDPSGALIPLDKLELEGLDFTMCNPPFYTSREELVSAAQAKERPPFSACTGAEVEMVTQGGEVAFVSRMIEESLGLRQKVLWYTSMLGKLSSVSILVEKLIGHGNHNYAVTEFVQGSKTRRWAIAWSWGDLRPSVDVARSITTFPKHLLPFPSEYIFNIPQGSVDDASQKLDKELASLPLQWLWRNNLAVGVGFALENVWSRQARRKSKGSAGAMQSIDVDDSRAALGFKVHLRKEGIEEKGVRVLVRWLKGTDSVLFESFCGMVKRKLEGR

SEQ ID NO: 296 - protein, 429 aa, Petromyces alliaceus
MRAARNNIYKDDVDFATLARQSPEFAKYLKRNNQLDFGDPDAVRQLTKSLLQRDFNLKVHIPENRLCPPVPNRFNYILWLQRLLDTTGNEYRDDYDPDRKVVGLDIGTGCCSIYPLLGCAVRPQWKFVATDIDDDNIRTSQEAVSANELDSRIRIIKTDPSDSLISLKKLEVETLDFTMCNPPFYVSREELVYSAQAKKRPPFSTCTGAEVEVVTQGGEVAFVSRMIEESLHLRERVSWYTSMLGKLSSVTILVEKLIEHDNHNYAVTEFVQGSKTRRWAIAWSWGDLRPSVDVARSITTLPRHLLPFPSEFIFDIPTGSIDSEGRNLDNELTSLPLQWVWRSTLATGAGFAMGNVWSRQARRKMKGSAGAMQSMDIDEKKAALGFKVLLRKEGIEEKGVRVLIRWLKGTDPVLFESFCGMVKRKLEGR

SEQ ID NO: 297 - protein, 384 aa, Bondarzewia mesenterica
MHPRNPYRTPPDFASLAESYPALQTHIKTSPTGGATIDFKDAAAQRSLMEALLYRDFGLFMNIPDNRLCPPVPNRLNYVLWIQDIIRAHSDHRVGASVKGIDIGTGASTIYPLLACRLSPSWTMIGTEVDDVSFRSAQENVERNKLADRITIVAVSKEGPLLVPLATDPTDSFDFVMCNPPFYSSAEDVARSVDSKELGPNAVCTGADVEMITEGGESAAKRGAGPSDGLSPTYAFPTYALANIFRPAFDLRSHSHTISHFLPQTLARISNPTIQNLMPAHTTLRQPIPHAASLALLHTTLSSLPSIHIEPCTTESPSSSILVSAQTNSWSRAARRRPVAAESGTGPPLMVCRVSVLQDEDGAGATVVATWVRGRDRAAFESFF

SEQ ID NO: 298 - protein, 523 aa, Cladophialophora psammophila
MPAPDNIYENDVDFTTLALQYPDFAKRLKPNRQLDFSDPESVRQLTKCLLHRDFDLNIDLPEDRLCPPVPNRFNYILFIQRLLDSTSPSFHQGFDPDRQVIGLDIGTGASAIYPLLACRQRQQWRFLATEIDEKNREYAQRNILANKLQARIRLIDTDDKGDRLIPTGQLQRFDRIDILLTNPPFYPSTQSLLDSAHQKSRPPNSSCTGSTVEMITPGGEIGFVSKIIAESLLPANKRKIQWFSAMLGKLSSVGAVVEHLRESGSGNYTVAEFVQGQRTRRWCVAWSWMGYRPANNVARSVGSGSGVERKLLPAITEMEFELPAGGSGGGDGLGSVLDKVCSQIQSLDGEGVRWKVDRARGFGIFMSRHGDVWSRKARRRKRAESERESGHEHDTDSSEEEPEPEPALVVRISITPSPGSAAGGPAPLSRPSQRPHPLSTSGVRPSSTRPSTASKTRASTGPSPGTTDPDVDMDMDIHEHAHARVYIHMRHLQGQNLVLFESFCGWLKRRVASPAPVPVSARR

SEQ ID NO: 299 - protein, 453 aa, Torrubiella hemipterigena
MENIHKINTIQDVNNLDQAQKDEHFRHLYDDQPNFKTLARLDPDFAILEKEKDLDFTDPRVVMQLTKTLLKLDFGLYLDLPYNRLCPTVKNRHNYILWLKDLLDSTSEAGIDAKRVGMDIGTGASCIYPLLGCVQRPWSFLAVDIDEESLTWARRNIILNDLDSRIRLLKSSNQGPIFPIEEAGIDYLDFTMTNPPFYTSEEEMAESAAKKNLPPLTACTGAPVEMVTTGGEVEFVTRMVTQSLETRTKVQWYTAMFGFLSSVSKIVDLLHEHKIDNFAVTEFVQGVKTRRWAIAWSFHDNRPTQAVCRGIKADAVPKSVLPSSTEATVVRLTALTDISAFAEDFQTAISKLDLEIWEWDKYKLEGKGRARDKVWARAWRRKRKRAASGVAEEDVSLDDRQNVFGFMVLIHVESDAAIISSRWTQGHDAVAFESFRGFLKATAKACAAKLASK

SEQ ID NO: 300 - protein, 475 aa, Aphanomyces invadans
MRGEKRKRTVVNNDGIHPRNMYRTPPDFEGLAKAYPSLQPYVRQSSNGTCSFQWNDPQAARELTKSLLHRDFGVTWDIPLNRLCPPLTNRLNYIHWIEDLILLSRSTYTATSDEGPIWGIDIGTGASCIYPLLGHSLNQWNFIATDIDALSLRYATANVESNNLSHAIHVEAVAPDAPSVLLIKSIATHASPILFSMCNPPFFDSVEEADTNPRTACTGSHGEMTTPGGEVAFISTMIQDSLVLHTKVRWYTSLIGRKSSLRPLLALLRSHGVCNMRTTEFLQGRTTRWGLAWSFTSDGHGSERQHSHKVLAKRRESKRRQELTFRVDQTDTSECVSLDLVHRRILDSAALVHMSEMDLAVTEGSSDQHGQPRRRMYMIEATRAGDGHRVLLFQAAVCAEATAVADNAGHRHECVDVALVWQQGVARDQFWTFSDKWKGAILRSGRRWRKAARPPCEGVARLGDAAAEQHDELKV

SEQ ID NO: 301 - protein, 398 aa, Botryobasidium botryosum
MSCREETRYHSHPLPNRRSRDGQVPNRLNYVLWIKGIIDSTTHRDGGGDQIIRGIDIGTGASAIYPLLGCAVNPNWHFVATDIDDISLLYASTNIKANNLESRIKTRKSDADGPILSPLTSPSRDGADLDQQPFDFTMCNPPFYASKEEIALLAGAKEFDPHAVCTGSTLEMITEGGEVGFVKRMIEESRTVPLRCRWFTSLLGKLSSVVEVVEMLKNIGVDNYGITEFVQGHTRRWGVAWSFGDERLPDNLARISNHALQAAIPPHNNLQQTYGNTISPEGLMDTIRSVLSAHPGMHVEEIPALGQNPSVLASLRVCAWGNTWSRAARRKKRNDDEMQVDTRDGAHGSTPASVECVIEGRRKELGACYLECRWVRGRDRALFESLWSHLSRKVAGAR

SEQ ID NO: 302 - protein, 468 aa, Colletotrichum higginsianum
MSSKKRRHSDAESKHETDKSLQNAVRHAGRGSATTRPQQPGTHADAYYRNLYSTEPDFNNFGRQDPAFGAMLKRGTLDFDDPAAVMQLTKTLLRIDFGLGIELPEDRLCPPVPNRHNYILWLKGLLDSTTYDDPDRKSVGLDIGTGASCIYPLLGCTQRLWSFFATDIDQKNLAYARKNVQSNNLHNRISVVARTAQDPILSLDSLGVDELSFVMCNPPFYTSEEDLLESAQKKSRPPLTACTGAPVEMVTDGGEVSFVGKMLEESLVLRDRVQWYTSMFGKQSSLEEFVNILREKAIDNYAVTEFVQGNKTRRWAVAWSFGPMRPSEEVARGLKAATWKKILPMAVESEVVSFPLDDGAGKLGDKIQGLMSSLELTSWEWDHERLVGIGRARENVWSRAWRRKKMREERDGKPEVAVTDSEVCRFGFEVALRVGRENIAVLCRWREGHDQAIFESFGGFLKTRLTTG

SEQ ID NO: 303 - protein, 468 aa, Colletotrichum tanaceti
MSSKKRRHSDAGSKHETDKSLPNAVRPAGRGSANTRPQQPGTHADAYYRNLYSTEPDFNNLGRQDPAFGAMLKRGTLDFNDPAAVMQLTKTLLKIDFGLEIELPKDRLCPPVPNRHNYILWLKGLLDTTTYDDPDRRSVGLDVGTGASCIYPLIGCTQRLWSFFATDIDEKSLAYARKNVQSNNLQHRISVVARTAQDPILSLDSLGVDELGFVMCNPPFYTSEEDLLDSAQKKSRPPLTACTGAPVEMVTDGGEVGFVGKILEESLILRDRVQWYTSMFGKQSSLEAFVGILREKAVDNYAVAEFVQGNKTRRWAVAWSFGPMRPSEEVARGLKAATWKKTLPMAVEAEVVRLPLEDGAGKLGDKIQGLMSSLELTSWAWDHEKLVGIGRARENVWSRAWRRKKMREERDGKPEVAATDSEMCRFGFEVALRVGRENIAVLCRWREGRDQAIFESFGGFLKTRLTTG

SEQ ID NO: 304 - protein, 416 aa, Pneumocystis murina
MTYHNFYLDNPPNFSELAEKYPSLKPFLDNQSHVNFKNPAALREVTKCLLKHDFKIDIFLHEKRLCPPVPNRFAYILWIQELIDFVNCDEKKKVVAFDIGTGSVCIYPLLCCSQRPNWFFYATDIDELSLELARENVKRNCLDNQIKIVDTAKYSTLIPLDELNISKIDFCMCNPPFYGSEEEILTSSRLKSKEPFSSCTGSLIEMVTPGGEVAFVKRMLKESCVLKERVNWYTTMLGKLSNVTKIIEHLKEIQINNYVINELPVGGNTRRWVIGWSFTDMRAPNHYVRPLTKSLRHLGSSLTMVIIKLDTTIENLRQKISSIIKKFNINFTWNNEYIGNGETPGNLWSRSSRRQISKKNSENSLDVNFKFRLEIVPQTNAEHAILLKVLWIKGIDKIIFESFYSMLRRELRSLNK

SEQ ID NO: 305 - protein, 404 aa, Malassezia vespertilionis
MHPRNRYSKGLALEKLAQVDAKLAKHLTFRHGSLQLDFQDETAVRALTAALLAHDFGVHCTLPPDHLCPALPNRLNYIHWIEDVLHASHITDVQGLDIGTGSIAIYACLACAMHPAWTMVGTDIDPSAVASARATIESSPSLAQRITLVETTPHAPLFPRGKFAFCMCNPPFYASPADRQASASAKQEVRRKCTGHATELYTPGGELRFVQRMMDESMQESNRARIVWFSSMLGKLSSLHAAVAHLRCAKITNYAVTEFMQGTTKRWAIAWSFHGARLPDTLVRSEALAKLAPRSTERTTLISANGIAAALRECATLPKEHVDVTVLGEEHVALGLYSACWTRGARRKRKRKEVLAQRADPVLQVELRAQHGKLTIRWLYGMDAVLFESLSKHLFDYLANYSRE

SEQ ID NO: 306 - protein, 370 aa, Choiromyces venosus
MFCPVSPSPALTKCLLYRDFGLSLELPRDRLCPTVPNRLNYVLWVQDLLDSTGGLENDEVDTVREVVGLDVGTGASCIYPLLGCALRGNWKFIATDIDEKSLEYARENVKRNKEKVGDLDERITVFANSPDGDIFPIGKMGIEKLDFTMCNPPFYTSIDDMFDSAKKKNLPPSSSCTGTTTEMVYPGGETAFVSQMLTQSLHLRSNPNFSNTWYTSMLGKHSSVESLIPAIKQHTQNYAITEFKQGSTRRWGIAWSFGDRRPCLAAVRYDSSQLRGLMPFPTEFEFDAAAVSVGCGGVRGNVWSRAARRAKARRGLEIEGMSNGIALGFRIGLKEKGDQSVRVKIRWTRGTDSVLFESFCGMIKRKVLTG

SEQ ID NO: 307 - protein, 422 aa, Aspergillus sp.
MRNPYRNNVDFAALALRSPDFASCLTSSGQPDFSDPNSIRQLTKTLLRLDFSLAVDPPRDRLCPPVPNRLNYVLWLQDLLDSTSADYRDDYDPDRDVAGLDIGTGCCCIYPLLGCASRPRWEFVATDIDEENVQHSQKTAAENKLESRIKVLKTDPADELIPLHSLDTKTLDFTMCNPPFYASRDEMLSSAEAKEKPPSSACTGAETEMVTAGGEVTFVSRMLEESLRLRDQVTWYTTMLGKLSSVSMIVEKLMLEHGNHNYAVTEFVQGAKTKRWAVAWSWTDLRPAMHVARGITGFPKHLLPFPSEYTFDIADSSLDELSDRLDTEISALAVQWNWRKNLCAGVGFAMENVWSRQARRKMKTGAAQAEIDEHKAALGFKVRLTQGGIDPRVHVVIRWLKGTDSVLYESFCGMLKRKLEGR

SEQ ID NO: 308 - protein, 481 aa, Rhizophagus sp.
MPRNRHKDKFSLNAKSAPKELLGKRSHSESTESDLFSPNKMHPRNKYKDNSPDFSVLAFKYPSFYPFVNYSKEGKPYIDYKNPEAVRELTYCLLREDFNLFLDIPLDTLCPPIPSRLNYIHWIEDLISSTESHEELGQHTVHGIDIGTGASCIYPLLGCTLNKNWVFLATDIDKKAVKYAKDNVHRNNLDDKITVRRNKTDKKILLNENMIKDTTLNFSFCMCNPPFYENQEQYEKGVESKITSSHSICTGSSNEMFTPGGEFQFIKDILEESLILRTKIRWYTSKIGRLETVNKIVCELKKSGIDNYVVTEFCQGLTRRWGIGWSFGSQRPTFSGSQPVSKKLRRSAPPKSEFSVVLPTNVGEIFKFLRNLFDELEVTGQWNEESNTFYGSAQINTWSRAARRAKAKSEAQKTPITQKAGDGNLFEFTCNLEPEPLDVSISNTRVIISWTNGKDRNIFESFYLHIKKRLEQEFNDKTISL

SEQ ID NO: 309 - protein, 429 aa, Aspergillus bertholletiae
MRVIRNNIYKDDVDFATLALQSPEFAKYLKPNNQLDFSDPDAVRQLSKSLLQRDFGLNVHIPENRLCPPVPNRLNYILWLQSLLDTTGYEYRDDYDPDRNVVGLDIGTGCCSIYPLLGCSLRPQWNFVATDIDDDNIRTSQEAVSGNKLESRIRIVKADPSGDLISFDKLEVERLDFTMCNPPFYTSREELVTSALTKERPPFSACTGAEVEMVTQGGEVAFVSRMIEESLSLRQKVLWYTSMLGKLSSVSILVEKLIGHGNHNYAVTEFVQGSKTRRWAIAWSWGDLRPSVDVARSITTFPKHLLPFPSEYVFDIPSGSIDDASQKLSKELASLPLQWLWRSNLAMGVGFAMENVWSRQARRKMKGLAGAMQSIDIEEGRAALGFQVHLRKEGIDEKGVRVLIRWLKGTDSVLFESFCGMVKRKLEDR

SEQ ID NO: 310 - protein, 432 aa, Aspergillus mulundensis
MARDLYKDGVDFASLALQSAEFAKFLKPNNQLDFTNPDAVRQLTVSLLKRDFGLTVDIPEARLCPPIPNRLIYIIWLQDLLDTTGDGYRDAYDPDRVVTGLDIGTGCCSIYPLLGVKSRSNWNFVASDIDDDNIKTSTQTIQANNLDSRIRIVKTSPDGDLISLGTLGVERLDFTMCNPPFYASQDEMVVSAEEKDRPPFSACTGAEVEMVTPGGEVSFVSRMITESIALRDKVLWYTSMLGKLSSVSALIEKLNDLGNTNYAVTEFVQGNKTRRWAIAWSWTDRRPAVSVARGIQSPNYPKHLLPFPSEYTFTLSGRSIDDISSAVNAEFSSLHIDWTWHSGLTLGIGFAATNVWSRQYRRMMKLSPNAASGSEVDPDTAALGFRVQLAMEPSAGETGERSVKVLIRWLKGMDSVLFESFCGMVKRKLEGR

SEQ ID NO: 311 - protein, 428 aa, Aspergillus ibericus
MRASRNIYKDEVDFTALALQSPDFAKHLKSNGQLDFSDPDTVRQLTKSLLQRDFQLEVQVPENRLCPPVYRLNYILWLQDLLDSTGDEYRDNYDPDREVIGLDIGTGCCSIYPLLGCSMRPHWRFIATDIDDDNIKTSRETVSANKLDSRIEIIQTDPKDDLISLDTKLKVDRLDFTMCNPPFYATRDELIASAEAKERPPFSACTGAEVEMVTTGGEIAFITRMIEESQHLRERVIWYTTMLGKLSSVSVLIETLLEHKNNNYAVTEFIQGNKTRRWAIAWSWTDLRPTVTVARGTSAIPKHLLPFPSEYIFTTQSESLDEVSTKIDTELTSLHIQWLWRKNLSTGVGFAMQNVWSRQARRKMQNPDAMSDKASIDETNAALGFKVQLKKDPIDEKEVRVIIRWLKGRDTVLFESFCGMLKRKVEGK

SEQ ID NO: 312 - protein, 558 aa, Monosporascus sp.
MDVPNYNRGTKRKYSGDQHARAFPDDVSPARTSISPVLAHTAMQSADIGGDGNDKIYNSAGAEENPDACQLSRVPASTVTASDDEHYRTLYTRELDFHALGEQDRELASLLQGGSRLDFANPLAVMQLTKTLLRLHFGLRVDLPLDRLCPPVPNRHNYILWLKDLLDTTSPSYSQIYEPERPVEGLDIGTGASLIYPLLACAQRPSWTFIATDVDAKSIAYARRNAELNNLQSRIRVVGRDIAAPLVPLDDLNIETIDFVMVNPPFYASESELIDLARQKSRPPHSACTGAPIEMVCEGGEVGFVRRIIDESLVLRRRVQWYTAMLGKQSSLDILVGLLKENGIDNYAMKTFVQGNKTRRWALGWSFHGRRPSVRTTRGVELATTKNILPFPTELTALRKSVSCGIDPEQLVRTLRTTMETLDLVSWNWDALLSRGIGFADGNVWSRAYRRRKERRNYMTTASPQGDEASTDKAKKSPDLSTQQKLRGVADCAFGFALSIRVEHGSRGTTDEVTLAVRWLQGHDYLLFESFTGMLRSAILRTVRALDENEEVSCPRLG

SEQ ID NO: 313 - protein, 1677 aa, Gymnopilus dilepis
MGTSRIPNAAPNNPGCRLYSPLNARRVEPSLSPMASNDLEFEISEDLSQLTCQKKDWPLHKAICKENSSNVHKILTSFMANPFLVAFLQVAFASQFNLAEDSEVLKFINKPFIARCEVSLHPTDKAFMLKLATGTISKEELEKGCEGMLQLKSFTPLNFEKDGTKAVRALRLEIWKEAKRRVVEDGEPYTPVALVDFVLRGGEVGIPFAVEISEDSGAAMLAGRGITYHDVRAGHEFTTKIQPDVEMCLDAINFHIYLDKKDQLRLRSHLNKKDIEQLRTSNERSGYSYLIANNVPRPPSKKTMASDTGTRRPLREVSVFEAIHPDIEPTFREIATPKDEVRKGRSKIPGGCSYCAKVAQNGQELRRCSRCKMIWYCSQDCQKKDWAVHKPICKETGSSIQKIVTSFMANPLLVFFVQVALILEFKLIDTVTAANFIDTPFIALCDVNIEPADMMYMMNRNVDQLSQKQIDHGCEGMLQLKKFTAQNADEGVDKLRMEIWKNARRNAAKNGHPHACIGLVDFVLKGSEQRMPFAVEIMCQKTDWPIHKPICKENSSNIHKLLTSFMANPLLVYYLQVAFVIQFNLTDNAQAAKFIDKPFIARCQVRIDPVDMAFMFMLRMDRFSKEQLEKGTEGMLQLKTFVPLDMDEDGKGAGDALRMEIWKDAKRKAAANGLPHAPIGLVEFVLWGREQGMPFAVGISEDSVNRVLSGEGFEYASAVFDGPTKVELDVEACLDLQGYKHAYPRRQEESVAPAYSPEQERHRQALRTRSVVLIHEPTSERSTIDFKDEEAQRTLDLYQSRRLTEAIMRRDLGVVLSIPEGRLCPPVPNRYSPSQRAKFRIVTYRWIPGRMNYVLWIQDIVYAHGDVLGGQTGSNQRKIRGLDIGTGSTAIYPLLACKLNPNWEMVGTELDDFSYETALKNVEFNNLQLSIQILKAFNDRPILSPLEEQTFDFCMCNPPFYASKEEIERSAKGKELPSNAVCTGADIEMIYPPGGEEAFVGRMVEESKQFGVRCKWYTSMLGKMSSVKTIVEMLKERSITHYAITEFVQGQTRRWAVGWSYSDERLPDTTARIVNINPKHPLYVLMPPRTTLVQTFRLQGPSSDVGEVVKVVNRVLDALAGMSVSVSLVHASSLPSGPAAPTAIGGSEYAGAVVDAGEPDAPELSDPDGSAESVVTMASTCTPSMNAAPQLPSGAATVWVVEATENSWSRSARRKNKSRESQKNQTTQVMASTSELEPMRSVKMSRSRQHQQREQEEEQKQANPEVVVKPALTCSILARVVEVSGFDSSAVGGGLGRAASGGPHAHDVDSADGSDGDGDGAISTARAGRTLELEFQWIYGSDRGLFESFAGHIGRKRLHMAATGGKKLVWLITGASSGLGRELAVQALARSERVIATTRARSFSKLNALKAQGADILQLDVTSPLESLRETAEKAVAIHGGIDVLVNNAGASLRAFCDMHVLVPLRRQHLKKLTTNSSEHERSADLAQAYGYPFVQSTNFFGAMNVARAFLPYMRKRRTGTVVWISSWYGWTGPPYAGNYVGTKWALRGISQSLNHEISPLGLRSLAVELGHFRTPILEPDRRVHKGTEIADYEGVVNSMEGMIQAYNGNQPGDPVKGVRAIIDVVRGEGVAEGKAFPSDLLLGSDCYNDVLDLTKKNLDLLDEWKDVACGADFASK

SEQ ID NO: 314 - protein, 435 aa, Coniella lustricola
MASTPRTNAYFRSLYLQDPNFRALAARDPHFRAILKPNGQLDFTDPAAVKQLTKTLLEADFGLKIELPDDRLCPPVPNRHNYILWLKSLLDSSSYNDPGGKLSGLDIGTGASCIYPLLGCAQRPWSFIATDIDEESLEHARANVALNDLQSRIKVVAREQTDPLIPLDDLGVDRIDFLMTNPPFYQSEGEMLKSAAKKSRPPHSACTGAPVEMVCEGGEALFVARILEESLLLKGRVQWYTAMFGMISSLETMVDKIRERGIDNYAVTEFVQGNKTRRWALAWSFGPMRPSQDACRGIKATPWRKILPMIVETELTKFPIEQGVSDKGKSLSALVGGLDMISWEWDAELLRGTGRARENVWSRAWRRKRKREELAGDSAVSDKVERSEICVFGFSLAISVKMTEAVVECRWREGHDEAIYTSFCGFIKTRFQASI

SEQ ID NO: 315 - protein, 424 aa, Pneumocystis jirovecii
MKYRNFYIDEPPNFAELAENYPSLKPFVDNQSRINFKDPAALREVTKCLLKKDFKIDIFLHEERLCPPIPNRFAYILWIQELIDFVSYNQEEQKVLAFDIGTGSTCIYPLLGCSQRPNWFFYATDIDKFSLELAQKNVTRNGLDNRIKIIDSTKYLTLIPLDELNISNIKFCMCNPPFYTSKEEMIASSQQKSKKPFSSCTGSLTEMVTPGGEVGFVKKIIKESYFLKERVNWYTSMLGKLSSVIKIIELFREMQIDNYVLSELPVGGNTRRWVVGWSFMDIRAPNHYVRPLAKSLIHLSSSLTMVDIKLDIRTEILKQKITYIMNKFNINFVWDNEYIGNGETPGNIWSRSARRQNSKITTENSYINFKFRLEIMSKNNTKNAVSLKIIWIKGIDKIIFESFYSMLRRELKTLNTSHNLFTQT

SEQ ID NO: 316 - protein, 424 aa, Pneumocystis jirovecii; identical to SEQ ID NO: 315

SEQ ID NO: 317 - protein, 463 aa, Hypoxylon sp.
MKRSTSLSAAPNSFKDDEYYETLYTEDLDFRSLGQRDPGFHAILERDSHVDFANPTSVMQLTKTLLKLDFGLLVDLPMDRLCPPVPNRHNYILWLKNLLDSSSPLPGSEPTKPATGLDIGTGASAIYPLLGCAQRSSWSFIATDVDEKSLSYARRNVELNNLQSRIRVVERTVTGCLIPLDELDLESIDFVMVNPPFYTSEAELEHLAKQKSRPPNSACTGAPIEMVCAGGEVGFARRMIDESLVLRERVQWYTCMLGKQSSLEILIDSLRSSNVVNYAVTAFVQGNKTRRWAIGWSFGNRRPNLSSSRGCEPVGGKKLLPPPTEATVSAWPISTAKIRDLERIICDTLQELNLVSWTWEESLSKGVGFVDGNVWSRAYRRKRARENQDTVSGELSFSGKKPPKPGTDQDVALCAFGFAITVQPSRDAANDEDQVTVTSRWLQGNDYALFESFTGFLQKAIRF

SEQ ID NO: 318 - protein, 558 aa, Monosporascus sp.
MDAPNYNRGTKRKYSGDQHARAFRDDVTSGRPSISPVPAHTAMQSADIDGYGTDESHNSARAEENPDACQASRVPASTVTASDDEHYRTLYTRELDFHALGEQDRELASLLQGGSRLDFANPLAVMQLTKTLLRLHFGLRVDLPLDRLCPPVPNRHNYILWLKDLLDSTSTSYSQIYEPERPVEGLDIGTGASLIYPLLACAQRPSWTFTATDVDAKSIAYARRNAELNNLQSRIRVVGRDIAAPLVPLDDLNIEMIDFVMVNPPFYASQSEPLDLARQKSRPPHSACTGAPIEMVCEGGEVGFVRRIIDESLMLRGRVQWYTAMLGKQSSLDILVGLLKENGIDNYAMKTFVQGNKTRRWALGWSFHSRRPSVRATRGVELATTKNILPFPTELTALRKNVSCGIEPEQLVRTLRTTMETLDLVSWNWDALLSRGIGFADGNVWSRAYRRRKERRNHMTTASPQGDEASTDNAKTSPDLATQQKLPGVADCAFGFALSIRVEHGSGGTTDEVTLAVRWLQGHDYLLFESFTGMLRSTILRTVRALDENDEVSCPRPG

SEQ ID NO: 319 - protein, 472 aa, Trichoderma gamsii
MAEDASSRAQERPHAGVGTGSHRDLARGPKDAYFRNLYTKAPDFRAMALNDPEFAAFVKGRGRDLNFSDPNAVMQLTKTLLKVDFDLSIELPEDRLCPPVTNRHNYILWLKDLLDTTSYDEPGRKAVGLDIGTGASCIYPLLGCTQRDWSFIATDIDAKSLECARNNVKLNDLGSRVRVVGRKPDDALIPLDDLKMDSIDFTMTNPPFYESAEAMLESAAGKSRPPFTACTGAEVEMVTEGGEVGFISRIFEESLVLRERIQWYTAMVGFLSSLTKIVDKLWEHKIDNYAITEFTQGNKTRRWAIAWSFQPLRPAQSVARGTKAALSRNILPSMTETTAFKMPLRDNIGGFAESLSNAIAALELISWNWNKEKLEGVGRAVDKVWSRPWRRQKKREAEMQMNAEMDDGGNTKKPSSEAQVCQFGFKVAVRVARDHVSVEARWLEGHDEVALESFRGFLKTASEKAVEDIKKA

SEQ ID NO: 320 - protein, 431 aa, Alternaria alternata
MSEDGMNLAQRPPYVTVDFKALAKSDKDFKQLWQRTSGKLDFQDPSTTQALSKAILRVDFGLELDVPDDRLCPPIPNRWNYVAWLQGLIDSTSPDYSSRYDPNRQVQGLDIGTGASAIYTLLCLRSRPNWSMCATDIDKKSFDSAARNLALNNLMTRTKLLQTTELNPLVPLAALGVDRLDFTICNPPFFNDVSDMQSSLKGEGKSWKPNAVCTGSENEMVCLGGDLGFVTKIVNESLVLREKVQWYTSMFGKMESAKAIINLLKKHGITNWAVGDIDVGSSTKRWIVAWSFGDLRPRNSHARIGKMANEFLPFPTSYPIALPPSVEPQTAKDAINTQLSSLDLTWTWDAVTSTGIGEASQNVWSRSYRRAYERNQREDLVDMKQDRKIELAFRIRVVDLAREVVVEWLRGTDQVLWESLCGLIHRHFKKT

SEQ ID NO: 321 - protein, 446 aa, Golovinomyces magnicellulatus
MIAHQNMYHNGINFSQLAKEDADFAKIKGFQSLKSNGQLDFSDPNAVLQLSQSLLRRDFGLSVVLPFDRLCPPVPNRLNYILWVQALLDTTDAPSLFEQMRTGVCHKSDSCSDNSPIIGIDIGTGASCIYPLIGCVLRSRWQFVGTDIDDKSIELARRNVELNKLGDRINVVKVYNQGPLIPLQALGQEQANFTMCNPPFYESREEMLNSAQVKKRPPFTACTGAEVEMITAGGEVAFVSRIIDESSILKNRIQWYSSMIGKLSSLPILLKKLQRAGVDNFALTEFVQGNKTKRWAIAWSFSDFRPTVEVARGASNVPKSLLPFPSQYRCRINITSLVEIGQRVNAFISQLPLEWQWHVQSLTGLGFSEKDVWSRAARRKCVAQCQKGKDHCVDTRNMSFGFEVRIENSSVNANFNQVTIRWTKGHDTVIFESFCGMLKSVMDKWN

1. A microalga or stramenopile comprising at least one exogenous nucleic acid molecule that encodes at least one substituted tryptamine biosynthetic pathway enzyme, wherein the microalga or stramenopile does not comprise an exogenous nucleic acid molecule encoding tryptophan decarboxylase.

2. The microalga or stramenopile of claim 1, wherein the at least one substituted tryptamine biosynthetic pathway enzyme comprises a tryptamine 4-monooxygenase, a 4-hydroxytryptamine kinase, and an N-methyltransferase.

3. The microalga or stramenopile of claim 1, wherein the at least one substituted tryptamine biosynthetic pathway enzyme comprises a tryptamine 5-hydroxylase.

4. The microalga or stramenopile of claim 1, wherein the at least one substituted tryptamine biosynthetic pathway enzyme comprises an indole-ethylamine methyltransferase.

5. The microalga or stramenopile of claim 1, wherein the at least one substituted tryptamine biosynthetic pathway enzyme comprises an indole-ethylamine methyltransferase, a tryptamine 4-monooxygenase, and a 4-hydroxytryptamine kinase.

6. The microalga or stramenopile of claim 1, wherein the at least one substituted tryptamine biosynthetic pathway enzyme comprises a dimethylallyl tryptamine synthase.

7. The microalga or stramenopile of claim 1, wherein the at least one substituted tryptamine biosynthetic pathway enzyme comprises a tryptamine 5-hydroxylase and an indole-ethylamine methyltransferase.

8. The microalga or stramenopile of claim 1, wherein the at least one substituted tryptamine biosynthetic pathway enzyme comprises a tryptamine 4-monooxygenase, a 4-hydroxytryptamine kinase, and either an N-methyltransferase or an indole-ethylamine methyltransferase, wherein the N-methyltransferase or indole-ethylamine methyltransferase is overexpressed and/or present in multiple copies.

9. The microalga or stramenopile of claim 1, which is Chlamydomonas reinhardtii, Phaeodactylum tricornutum, or Schizochytrium limacinum.

10. The microalga or stramenopile of claim 1, which is capable of producing at least one substituted tryptamine.

11. A microorganism comprising at least one exogenous nucleic acid molecule that encodes at least one substituted tryptamine biosynthetic pathway enzyme, wherein the at least one substituted tryptamine biosynthetic pathway enzyme comprises a tryptophan decarboxylase, an indole-ethylamine methyltransferase, a tryptamine 4-monooxygenase, and a 4-hydroxytryptamine kinase.

12. The microorganism of claim 11, wherein the indole-ethylamine methyltransferase comprises an amino acid sequence with at least 80%, at least 85%, at least 90%, at least 95%, at least 99%, or 100% sequence identity to the sequence as shown in any of SEQ ID NOs: 16 and 60-98.

13. The microorganism of claim 11, which is a microalga.

14. The microorganism of claim 11, which is capable of producing at least one substituted tryptamine.

15. A cell culture comprising (i) a microalga or stramenopile comprising at least one exogenous nucleic acid molecule that encodes at least one substituted tryptamine biosynthetic pathway enzyme and (ii) a culture media supplemented with a high concentration of tryptamine.

16. The cell culture of claim 15, wherein the microalga or stramenopile is Chlamydomonas reinhardtii, Phaeodactylum tricornutum, or Schizochytrium limacinum.

17. The cell culture of claim 15, wherein the high concentration of tryptamine is at least about 1 mM, 2 mM, 3 mM, 4 mM, 5 mM, 6 mM, 7 mM, 9 mM, or 10 mM.

18. The cell culture of claim 15, wherein the at least one substituted tryptamine biosynthetic pathway enzyme comprises a tryptamine 4-monooxygenase, a 4-hydroxytryptamine kinase, and an N-methyltransferase.

19. The microorganism of claim 15, wherein the microorganism or stramenopile does not comprise an exogenous nucleic acid molecule that encodes a tryptophan decarboxylase.

20. The cell culture of claim 15, wherein the microalga or stramenopile produces at least one substituted tryptamine.
